(19) United States
(12) Patent Application Publication
(10) Pub. No.: US 2023/0399640 A1
(43) Pub. Date: Dec. 14, 2023

(54) COMPOSITIONS AND METHODS FOR INHIBITING GENE EXPRESSION

(71) Applicant: FLAGSHIP PIONEERING INNOVATIONS V, INC., Cambridge, MA (US)

(72) Inventors: Jodi Michelle KENNEDY, Dedham, MA (US); Jeremiah Dale FARELLI, Marblehead, MA (US)

(21) Appl. No.: 18/246,480

(22) PCT Filed: Sep. 24, 2021
(86) PCT No.: PCT/US2021/051945

§ 371 Date: Mar. 23, 2023

Related U.S. Application Data
(60) Provisional application No. 63/082,555, filed on Sep. 24, 2020.
(60) Provisional application No. 63/242,957, filed on Sep. 10, 2021.

(51) Int. Cl. C12N 15/11; C12N 9/22; C12N 9/10; C07K 14/195

(52) U.S. Cl. CPC C12N 15/11; C12N 9/22; C12N 9/1007; C12Y 201/01043; C07K 14/195; C12N 2310/20; C07K 2319/80

(57) ABSTRACT

The present disclosure relates to expression repressors and expression repression systems for modulating expression of a target gene in a cell.

### CROSS-REFERENCE TO RELATED APPLICATIONS

[0001] The present application claims the benefit of U.S. provisional applications 63/082,555 filed Sep. 24, 2020 and 63/242,957 filed Sep. 10, 2021. The contents of the aforementioned applications are hereby incorporated by reference in their entirety.

### SEQUENCE LISTING

[0002] The instant application contains a Sequence Listing which has been submitted electronically in ASCII format and is hereby incorporated by reference in its entirety. Said ASCII copy, created on Sep. 17, 2021, is named 02057-7017 WO_SL.txt and is 694,831 bytes in size.

### BACKGROUND

[0003] Mis regulation of gene expression is the underlying cause of many diseases (e.g., in mammals, e.g., humans). While techniques exist that modulate gene expression for short periods of time, the treatment of many diseases calls for stable, long-term modulation of gene expression. There is a need for novel tools, systems, and methods to stably alter, e.g., decrease, expression of disease associated genes.

### SUMMARY

[0004] The disclosure provides, among other things, expression repressors and expression repression systems that may be used to modulate, e.g., decrease, expression of a target gene.

[0005] In some aspects, an expression repressor comprises a DNA targeting moiety and a repressor domain capable of modulating (e.g., decreasing) the expression of a target gene. In some embodiments, an expression repressor comprises a DNA targeting moiety, a first repressor domain, and a second repressor domain. In some embodiments, the first repressor domain is different from the second repressor domain. In some embodiments, the first repressor domain is identical to the second repressor domain.

[0006] In some aspects, the disclosure features an expression repression system comprising a first expression repressor comprising a first DNA-targeting moiety and a first repressor domain, and a second expression repressor comprising a second DNA-targeting moiety and a second repressor domain. In some embodiments, the first DNA-targeting moiety specifically binds a first DNA sequence, and the second DNA-targeting moiety specifically binds a second DNA sequence different from the first DNA sequence. In some embodiments, the first repressor domain is different from the second repressor domain. In some embodiments, an expression repression system comprises: (i) a first expression repressor comprising a first DNA-targeting moiety, a first repressor domain, and a second repressor domain, and (ii) a second expression repressor comprising a second DNA-targeting moiety and a first repressor domain. In some embodiments, all three of the repressor domains are different. In some embodiments, at least two repressor domains are identical. In some embodiments, an expression repression system comprises: (i) a first expression repressor comprising a first DNA-targeting moiety, a first repressor domain, and a second repressor domain, and (ii) a second expression repressor comprising a second DNA-targeting moiety, a first repressor domain and a second repressor domain. In some embodiments, all four of the repressor domains are different. In some embodiments, at least two repressor domains are identical.

[0007] Generally, modulation of expression of a target gene by an expression repression system involves the binding of the first expression repressor and second expression repressor to the first and second DNA sequences, respectively. Binding of the first and second DNA sequences localizes the functionalities of the first and second repressor domains to those sites. Without wishing to be bound by theory, in some embodiments it is thought that employing the functionalities of both the first and second repressor domains stably represses expression of a target gene associated with or comprising the first and/or second DNA sequences, e.g., wherein the first and/or second DNA sequences are or comprise sequences of the target gene or one or more operably linked transcription control elements.

[0008] In some aspects, the disclosure provides an expression repressor or an expression repression system comprising: a targeting moiety that binds a genomic locus comprising at least 14, 15, 16, 17, 18, 19, or 20 nucleotides of the sequence of SEQ ID NO: 1-21, wherein the expression repressor or the expression repression system is capable of decreasing the expression of a target gene.

[0009] In some aspects, the disclosure provides an expression repressor comprising: a DNA-targeting moiety (wherein optionally the DNA-targeting moiety comprises a CRISPR/Cas molecule, e.g., a catalytically inactive CRISPR/Cas protein), that binds to a transcription regulatory element (e.g., a promoter or transcription start site (TSS)) operably linked to a target gene, or a sequence proximal to said transcription regulatory element; and a repressor domain. In some embodiments, an expression repressor comprises a DNA-targeting moiety (wherein optionally the DNA-targeting moiety comprises a CRISPR/Cas molecule, e.g., a catalytically inactive CRISPR/Cas protein), that binds to a transcription regulatory element (e.g., a promoter or transcription start site (TSS)) operably linked to a target gene, or a sequence proximal to said transcription regulatory element, a first repressor domain, and a second repressor domain. In some embodiments, the first repressor domain is identical to the second repressor domain. In some embodiments, the first repressor domain is not identical to the second repressor domain.

[0010] In some aspects, the disclosure provides an expression repression system comprising: (i) a first expression repressor comprising a first DNA-targeting moiety (wherein optionally the DNA-targeting moiety comprises a CRISPR/Cas molecule, e.g., a catalytically inactive CRISPR/Cas protein), that binds to a transcription regulatory element (e.g., a promoter or transcription start site (TSS)) operably linked to a target gene, or a sequence proximal to said transcription regulatory element; and a first repressor domain and a second expression repressor comprising a second DNA-targeting moiety (wherein optionally the DNA-targeting moiety comprises a CRISPR/Cas molecule, e.g., a catalytically inactive CRISPR/Cas protein), that binds to a transcription regulatory element (e.g., a promoter or transcription start site (TSS)) operably linked to a target gene, or a sequence proximal to said transcription regulatory element; and a first repressor domain. In some embodiments, the first repressor domains of the first expression repressor and the second expression repressors are identical. In some embodiments, the first repression domains of the first and the second expression pressors are different. In some embodiments, the first DNA-targeting moiety and the second DNA-targeting moiety are identical. In some embodiments, the first DNA-targeting moiety and the second DNA-targeting moiety are different. In some embodiments, an expression repression system comprises a first expression repressor comprising a first DNA-targeting moiety (wherein optionally the DNA-targeting moiety comprises a CRISPR/Cas molecule, e.g., a catalytically inactive CRISPR/Cas protein), that binds to a transcription regulatory element (e.g., a promoter or transcription start site (TSS)) operably linked to a target gene, or a sequence proximal to said transcription regulatory element, a first repressor domain, and a second repressor domain and a second expression repressor comprising a second DNA-targeting moiety (wherein optionally the DNA-targeting moiety comprises a CRISPR/Cas molecule, e.g., a catalytically inactive CRISPR/Cas protein), that binds to a transcription regulatory element (e.g., a promoter or transcription start site (TSS)) operably linked to a target gene, or a sequence proximal to said transcription regulatory element; a first repressor domain and a second repressor domain. In some embodiments, the first repressor domains of the first expression repressor and the second expression repressors are identical. In some embodiments, the first repression domains of the first and the second expression pressors are different. In some embodiments, the second repressor domains of the first expression repressor and the second expression repressors are identical. In some embodiments, the second repression domains of the first and the second expression pressors are different.

[0011] In some aspects, the disclosure features a nucleic acid encoding an expression repressor or a component thereof (e.g., a gRNA). In some aspects, the disclosure is directed to a nucleic acid encoding the first expression repressor, second expression repressor, both, or a component thereof (e.g., a gRNA). In some aspects, the disclosure is directed to a vector comprising a nucleic acid described herein. In some aspects, the disclosure is directed to a cell comprising an expression repressor, an expression repression system, nucleic acid, or vector described herein. In some aspects, the disclosure is directed to a lipid nanoparticle comprising a vector, a nucleic acid, an expression repression system, or an expression repressor described herein. In some aspects, the disclosure is directed to a reaction mixture comprising an expression repressor, an expression repression system, a nucleic acid, a vector, or a lipid nanoparticle described herein. In some aspects, the disclosure is directed to a pharmaceutical composition comprising an expression repression system, nucleic acid, or vector described herein.

[0012] In some aspects, the disclosure is directed to a method of decreasing expression of a target gene comprising providing an expression repressor or an expression repression system described herein and contacting the target gene and/or one or more operably linked transcription control elements with the expression repressor or the expression repression system, thereby decreasing expression of the target gene.

[0013] In some aspects, the disclosure is directed to a method of treating a condition associated with over-expression of a target gene in a subject, comprising administering an expression repressor or an expression repression system, nucleic acid, or vector described herein to the subject, thereby treating the condition.

[0014] In some aspects, the disclosure is directed to a method of treating a condition associated with mis-regulation of a target gene in a subject, comprising administering an expression repressor or an expression repression system, nucleic acid, or vector described herein to the subject, thereby treating the condition.

[0015] Additional features of any of the aforesaid methods or compositions include one or more of the following enumerated embodiments.

[0016] Those skilled in the art will recognize or be able to ascertain using no more than routine experimentation, many equivalents to the specific embodiments of the invention described herein. Such equivalents are intended to be encompassed by the following enumerated embodiments.

[0017] All publications, patent applications, patents, and other references (e.g., sequence database reference numbers) mentioned herein are incorporated by reference in their entirety. For example, all GenBank, Unigene, and Entrez sequences referred to herein, e.g., in any Table herein, are incorporated by reference. Unless otherwise specified, the sequence accession numbers specified herein, including in any Table herein, refer to the database entries current as of Sep. 23, 2019. When one gene or protein references a plurality of sequence accession numbers, all of the sequence variants are encompassed.

### ENUMERATED EMBODIMENTS

[0018] 1. An expression repressor comprising:
   [0019] a DNA-targeting moiety and
   [0020] a repressor domain,
      wherein the expression repressor is capable of decreasing expression of a target gene.
[0021] 2. The expression repressor of embodiment 1, wherein the DNA-targeting moiety binds to a transcription regulatory element (e.g., a promoter, an enhancer, a super enhancer, or transcription start site (TSS)) operably linked to the target gene or binds to a sequence proximal to said transcription regulatory element.
[0022] 3. The expression repressor of embodiment 1 or 2, wherein the repressor domain is covalently linked to the DNA-targeting moiety.
[0023] 4. The expression repressor of embodiments 1 or 2, wherein the repressor domain is linked to the DNA-targeting moiety via a linker.
[0024] 5. The expression repressor of any of embodiment 1-4, wherein the repressor domain is C-terminal of the DNA-targeting moiety.
[0025] 6. The expression repressor of any of embodiments 1-4, wherein the repressor domain is N-terminal of the DNA-targeting moiety.
[0026] 7. The expression repressor of any of embodiments 1-6, wherein the repressor domain is encoded by a nucleotide sequence chosen from any of SEQ ID NOs: 47-56, or a sequence with at least 80, 85, 90, 95, 99, or 100% identity thereto, or having no more than 20, 19, 18, 17, 16, 15, 14, 13, 12, 11, 10, 9, 8, 7, 6, 5, 4, 3, 2, or 1 positions of difference thereto.
[0027] 8. The expression repressor of any of embodiments 1-7, wherein the repressor domain comprises an amino acid sequence according to any of SEQ ID NOs: 57-66, 90 or a sequence with at least 80, 85, 90, 95, 99, or 100% identity thereto, or having no more than 20, 19, 18, 17, 16, 15, 14, 13, 12, 11, 10, 9, 8, 7, 6, 5, 4, 3, 2, or 1 positions of difference thereto.
[0028] 9. The expression repressor of any of the preceding embodiments, wherein the repressor domain is MQ1 or a functional variant or fragment thereof, e.g., wherein the repressor domain comprises an amino acid sequence of SEQ ID NO: 57 or 90 or a sequence with at least 80, 85, 90, 95, 99, or 100% identity thereto, or having no more than 20, 19, 18, 17, 16, 15, 14, 13, 12, 11, 10, 9, 8, 7, 6, 5, 4, 3, 2, or 1 positions of difference thereto, wherein optionally the repressor domain is C-terminal of the DNA-targeting moiety.
[0029] 10. The expression repressor of any of the preceding embodiments, wherein the repressor domain is DNMT1 or a functional variant or fragment thereof, e.g., wherein the repressor domain comprises an amino acid sequence of SEQ ID NO: 58 or a sequence with at least 80, 85, 90, 95, 99, or 100% identity thereto, or having no more than 20, 19, 18, 17, 16, 15, 14, 13, 12, 11, 10, 9, 8, 7, 6, 5, 4, 3, 2, or 1 positions of difference thereto, wherein optionally the repressor domain is C-terminal of the DNA-targeting moiety.
[0030] 11. The expression repressor of any of the preceding embodiments, wherein the repressor domain is DNMT3a/3L, or a functional variant or fragment thereof, e.g., wherein the repressor domain comprises an amino acid sequence of SEQ ID NO: 59 or 60 or a sequence with at least 80, 85, 90, 95, 99, or 100% identity thereto, or having no more than 20, 19, 18, 17, 16, 15, 14, 13, 12, 11, 10, 9, 8, 7, 6, 5, 4, 3, 2, or 1 positions of difference thereto, wherein optionally the repressor domain is C-terminal of the DNA-targeting moiety.
[0031] 12. The expression repressor of any of the preceding embodiments, wherein the repressor domain is KRAB, or a functional variant or fragment thereof, e.g., wherein the repressor domain comprises an amino acid sequence of SEQ ID NO: 61 or a sequence with at least 80, 85, 90, 95, 99, or 100% identity thereto, or having no more than 20, 19, 18, 17, 16, 15, 14, 13, 12, 11, 10, 9, 8, 7, 6, 5, 4, 3, 2, or 1 positions of difference thereto, wherein optionally the repressor domain is C-terminal of the DNA-targeting moiety.
[0032] 13. The expression repressor of any of the preceding embodiments, wherein the repressor domain is G9A, or a functional variant or fragment thereof, e.g., wherein the repressor domain comprises an amino acid sequence of SEQ ID NO: 62 or a sequence with at least 80, 85, 90, 95, 99, or 100% identity thereto, or having no more than 20, 19, 18, 17, 16, 15, 14, 13, 12, 11, 10, 9, 8, 7, 6, 5, 4, 3, 2, or 1 positions of difference thereto, wherein optionally the repressor domain is N-terminal of the DNA-targeting moiety.
[0033] 14. The expression repressor of any of the preceding embodiments, wherein the repressor domain is HDAC8, or a functional variant or fragment thereof, e.g., wherein the repressor domain comprises an amino acid sequence of SEQ ID NO: 63 or a sequence with at least 80, 85, 90, 95, 99, or 100% identity thereto, or having no more than 20, 19, 18, 17, 16, 15, 14, 13, 12, 11, 10, 9, 8, 7, 6, 5, 4, 3, 2, or 1 positions of difference thereto, wherein optionally the repressor domain is C-terminal of the DNA-targeting moiety.
[0034] 15. The expression repressor of any of the preceding embodiments, wherein the repressor domain is LSD1, or a functional variant or fragment thereof, e.g., wherein the repressor domain comprises an amino acid sequence of SEQ ID NO: 64 or a sequence with at least 80, 85, 90, 95, 99, or 100% identity thereto, or having no more than 20, 19, 18, 17, 16, 15, 14, 13, 12, 11, 10, 9, 8, 7, 6, 5, 4, 3, 2, or 1 positions of difference thereto, wherein optionally the repressor domain is C-terminal of the DNA-targeting moiety.
[0035] 16. The expression repressor of any of the preceding embodiments, wherein the repressor domain is EZH2, or a functional variant or fragment thereof, e.g., wherein the repressor domain comprises an amino acid sequence of SEQ ID NO: 64 or a sequence with at least 80, 85, 90, 95, 99, or 100% identity thereto, or having no more than 20, 19, 18, 17, 16, 15, 14, 13, 12, 11, 10, 9, 8, 7, 6, 5, 4, 3, 2, or 1 positions of difference thereto, wherein optionally the repressor domain is N-terminal of the DNA-targeting moiety.
[0036] 17. The expression repressor of any of the preceding embodiments, wherein the repressor domain is FOG1, or a functional variant or fragment thereof, e.g., wherein the repressor domain comprises an amino acid sequence of SEQ ID NO: 66 or a sequence with at least 80, 85, 90, 95, 99, or 100% identity thereto, or having no more than 20, 19, 18, 17, 16, 15, 14, 13, 12, 11, 10, 9, 8, 7, 6, 5, 4, 3, 2, or 1 positions of difference thereto.
[0037] 18. The expression repressor of any of the preceding embodiments, which further comprises a second repressor domain.
[0038] 19. The expression repressor of embodiment 18, wherein the DNA-targeting moiety is situated between the repressor domain and the second repressor domain.
[0039] 20. An expression repressor comprising:
   [0040] a DNA-targeting moiety,
   [0041] a first repressor domain and
   [0042] a second repressor domain,
   [0043] wherein the expression repressor is capable of decreasing expression of a target gene.
[0044] 21. The expression repressor of any preceding embodiment, wherein the DNA-targeting moiety binds to a transcription regulatory element (e.g., a promoter, an enhancer, a super enhancer, or transcription start site (TSS)) operably linked to the target gene or binds to a sequence proximal to said transcription regulatory element.
[0045] 22. The expression repressor of any of embodiments 18-21, wherein the first repressor domain is identical to the second repressor domain.
[0046] 23. The expression repressor of any of embodiments 18-21, wherein the first repressor domain is not identical to the second repressor domain.
[0047] 24. The expression repressor of any of embodiments 18-23, wherein the first repressor domain and the second repressor domain are covalently linked to the DNA-targeting moiety.
[0048] 25. The expression repressor of any of embodiments 18-24, wherein the first repressor domain is linked to the DNA-targeting moiety via a first linker and the second repressor domain is linked to the DNA-targeting moiety via a second linker.
[0049] 26. The expression repressor of embodiment 25, wherein the first linker is identical to the second linker.
[0050] 27. The expression repressor of embodiment 25, wherein the first linker is not identical to the second linker.
[0051] 28. The expression repressor of any of embodiments 18-27, wherein the first repressor domain is N-terminal of the DNA-targeting moiety.
[0052] 29. The expression repressor of any of embodiments 18-28, wherein the second repressor domain is C-terminal of the DNA-targeting moiety.
[0053] 30. The expression repressor of any of embodiments 25-29, wherein the C-terminal end of the first repressor domain is linked to the N-terminal end of the DNA-targeting moiety via the first linker and the N-terminal end of the second repressor domain is linked to the C-terminal end of the DNA-targeting moiety via the second linker.
[0054] 31. The expression repressor of any of embodiments 18-30, wherein:
   [0055] the first repressor domain is EZH2, or a functional variant or fragment thereof, e.g., wherein the first repressor domain comprises an amino acid sequence of SEQ ID NO: 64 or a sequence with at least 80, 85, 90, 95, 99, or 100% identity thereto, or having no more than 20, 19, 18, 17, 16, 15, 14, 13, 12, 11, 10, 9, 8, 7, 6, 5, 4, 3, 2, or 1 positions of difference thereto, and the first repressor domain is N-terminal of the DNA-targeting moiety; and
   [0056] the second repressor domain is KRAB, or a functional variant or fragment thereof, e.g., wherein the second repressor domain comprises an amino acid sequence of SEQ ID NO: 61 or a sequence with at least 80, 85, 90, 95, 99, or 100% identity thereto, or having no more than 20, 19, 18, 17, 16, 15, 14, 13, 12, 11, 10, 9, 8, 7, 6, 5, 4, 3, 2, or 1 positions of difference thereto, and the second repressor domain is C-terminal of the DNA-targeting moiety.
[0057] 32. The expression repressor of any of embodiments 18-30, wherein:
   [0058] the first repressor domain is G9A, or a functional variant or fragment thereof, e.g., wherein the first repressor domain comprises an amino acid sequence of SEQ ID NO: 62 or a sequence with at least 80, 85, 90, 95, 99, or 100% identity thereto, or having no more than 20, 19, 18, 17, 16, 15, 14, 13, 12, 11, 10, 9, 8, 7, 6, 5, 4, 3, 2, or 1 positions of difference thereto, and the first repressor domain is N-terminal of the DNA-targeting moiety; and
   [0059] the second repressor domain is KRAB, or a functional variant or fragment thereof, e.g., wherein the second repressor domain comprises an amino acid sequence of SEQ ID NO: 61 or a sequence with at least 80, 85, 90, 95, 99, or 100% identity thereto, or having no more than 20, 19, 18, 17, 16, 15, 14, 13, 12, 11, 10, 9, 8, 7, 6, 5, 4, 3, 2, or 1 positions of difference thereto, and the second repressor domain is C-terminal of the DNA-targeting moiety.
[0060] 33. The expression repressor of any of embodiments 18-30, wherein:
   [0061] the first repressor domain is FOG1, or a functional variant or fragment thereof, e.g., wherein the first repressor domain comprises an amino acid sequence of SEQ ID NO: 66 or a sequence with at least 80, 85, 90, 95, 99, or 100% identity thereto, or having no more than 20, 19, 18, 17, 16, 15, 14, 13, 12, 11, 10, 9, 8, 7, 6, 5, 4, 3, 2, or 1 positions of difference thereto, and the first repressor domain is N-terminal of the DNA-targeting moiety; and
   [0062] the second repressor domain is FOG1, or a functional variant or fragment thereof, e.g., wherein the second repressor domain comprises an amino acid sequence of SEQ ID NO: 66 or a sequence with at least 80, 85, 90, 95, 99, or 100% identity thereto, or having no more than 20, 19, 18, 17, 16, 15, 14, 13, 12, 11, 10, 9, 8, 7, 6, 5, 4, 3, 2, or 1 positions of difference thereto, and the second repressor domain is C-terminal of the DNA-targeting moiety.
[0063] 34. The expression repressor of any of embodiments 1-33, wherein the DNA-targeting moiety binds a genomic locus comprising at least 14, 15, 16, 17, 18, 19, or 20 nucleotides of the sequence of any of SEQ ID NO: 1-21.
[0064] 35. The expression repressor of any of embodiments 1-34, wherein the DNA-targeting moiety comprises a CRISPR/Cas molecule (e.g., a catalytically inactive CRISPR/Cas protein), a zinc finger domain, or a TAL effector molecule.
[0065] 36. The expression repressor of embodiment 35, wherein the CRISPR/Cas molecule comprises one or more mutations selected from D10A, D839A, H840A, and N863A.
[0066] 37. The expression repressor of any of embodiments 1-36, wherein the DNA-targeting moiety binds to a promoter region of a target gene, an enhancer region (e.g., a super enhancer region), or an anchor sequence.
[0067] 38. The expression repressor of any of embodiments 1-37, wherein the repressor domain comprises DNMT1, DNMT3a/3L, MQ1, KRAB, G9A, HDAC8, LSD1, EZH2, or FOG1,
[0068] 39. The expression repressor of any of embodiments 18-38, wherein the first repressor domain comprising, DNMT1, DNMT3a/31, MQ1, KRAB, G9A, HDAC8, LSD1, EZH2, or FOG1, and the second repressor domain comprises DNMT1, DNMT3a/31, MQ1, KRAB, G9A, HDAC8, LSD1, EZH2, or FOG1,
[0069] 40. The expression repressor of any of embodiments 1-39, wherein the expression repressor is encoded by a nucleotide sequence chosen from any of SEQ ID NOs: 22-32, 92, 95 or a sequence with at least 80, 85, 90, 95, 99, or 100% identity thereto, or having no more than 20, 19, 18, 17, 16, 15, 14, 13, 12, 11, 10, 9, 8, 7, 6, 5, 4, 3, 2, or 1 positions of difference thereto.
[0070] 41. The expression repressor of any of embodiments 1-40, wherein the expression repressor comprises an amino acid sequence chosen from any of SEQ ID Nos: 33-36, 38-44, 67-69, 93, 96, or a sequence with at least 80, 85, 90, 95, 99, or 100% identity thereto, or having no more than 20, 19, 18, 17, 16, 15, 14, 13, 12, 11, 10, 9, 8, 7, 6, 5, 4, 3, 2, or 1 positions of difference thereto.
[0071] 42. The expression repressor of any of embodiments 1-41, wherein the DNA-targeting moiety is encoded by a nucleotide sequence chosen from any of SEQ ID NOs: 45 or 89 or a sequence with at least 80, 85, 90, 95, 99, or 100% identity thereto, or having no more than 20, 19, 18, 17, 16, 15, 14, 13, 12, 11, 10, 9, 8, 7, 6, 5, 4, 3, 2, or 1 positions of difference thereto.
[0072] 43. The expression repressor of any of embodiments 1-42, wherein the DNA-targeting moiety comprises an amino acid sequence according to any of SEQ ID NOs: 46 or 88, or a sequence with at least 80, 85, 90, 95, 99, or 100% identity thereto, or having no more than 20, 19, 18, 17, 16, 15, 14, 13, 12, 11, 10, 9, 8, 7, 6, 5, 4, 3, 2, or 1 positions of difference thereto.
[0073] 44. The expression repressor of any of embodiments 18-43, wherein,
   [0074] (i) the first repressor domain is encoded by a nucleotide sequence chosen from any of SEQ ID NOs: 47-56, 90 or a sequence with at least 80, 85, 90, 95, 99, or 100% identity thereto, or having no more than 20, 19, 18, 17, 16, 15, 14, 13, 12, 11, 10, 9, 8, 7, 6, 5, 4, 3, 2, or 1 positions of difference thereto, and
   [0075] (ii) the second repressor domain is encoded by a nucleotide sequence chosen from any of SEQ ID NOs: 47-56, 90 or a sequence with at least 80, 85, 90, 95, 99, or 100% identity thereto, or having no more than 20, 19, 18, 17, 16, 15, 14, 13, 12, 11, 10, 9, 8, 7, 6, 5, 4, 3, 2, or 1 positions of difference thereto.
[0076] 45. The expression repressor of any of embodiments 18-43, wherein,
   [0077] (i) the first repressor domain comprises an amino acid sequence according to any of SEQ ID NOs: 57-66, or a sequence with at least 80, 85, 90, 95, 99, or 100% identity thereto, or having no more than 20, 19, 18, 17, 16, 15, 14, 13, 12, 11, 10, 9, 8, 7, 6, 5, 4, 3, 2, or 1 positions of difference thereto, and
   [0078] (ii) the second repressor domain comprises an amino acid sequence according to any of SEQ ID NOs: 57-66, or a sequence with at least 80, 85, 90, 95, 99, or 100% identity thereto, or having no more than 20, 19, 18, 17, 16, 15, 14, 13, 12, 11, 10, 9, 8, 7, 6, 5, 4, 3, 2, or 1 positions of difference thereto.
[0079] 46. The expression repressor of any preceding embodiments, wherein the DNA-targeting moiety comprises a TAL effector molecule, a CRISPR/Cas molecule, a zinc finger domain, a tetR domain, a meganuclease domain, or an oligonucleotide.
[0080] 47. The expression repressor of any preceding embodiments, wherein the DNA-targeting moiety further comprises a gRNA, e.g., a gRNA that binds a genomic locus comprising at least 14, 15, 16, 17, 18, 19, or 20 nucleotides of the sequence of any of SEQ ID NOs: 1-21, e.g., wherein the gRNA comprises a sequence that comprises at least 14, 15, 16, 17, 18, 19, or 20 nucleotides of the sequence of any of SEQ ID NOs: 1-21.
[0081] 48. The expression repressor of any of embodiments 35-47, wherein the DNA-targeting domain comprises a CRISPR/Cas molecule, e.g., a catalytically inactive CRISPR/Cas protein, and a gRNA, e.g., a gRNA that binds a genomic locus comprising at least 14, 15, 16, 17, 18, 19, or 20 nucleotides of the sequence of any of SEQ ID NOs: 1-21, e.g., wherein the gRNA comprises a sequence that comprises at least 14, 15, 16, 17, 18, 19, or 20 nucleotides of the sequence of any of SEQ ID NOs: 1-21 and the repressor domain comprises a moiety chosen from DNMT1, DNMt3a/31, MQ1, KRAB, G9A, HDAC8, LSD1, EZH2, or FOG1.
[0082] 49. The expression repressor of embodiment 35-47, wherein the DNA-targeting domain comprises a CRISPR/Cas molecule, e.g., a catalytically inactive CRISPR/Cas protein, and a gRNA, e.g., a gRNA that binds a genomic locus comprising at least 14, 15, 16, 17, 18, 19, or 20 nucleotides of the sequence of any of SEQ ID NOs: 1-21, e.g., wherein the gRNA comprises a sequence that comprises at least 14, 15, 16, 17, 18, 19, or 20 nucleotides of the sequence of any of SEQ ID NOs: 1-21, the first repressor domain comprises a moiety chosen from DNMT1, DNM T3a/3L, MQ1, KRAB, G9A, HDAC8, LSD1, EZH2, or FOG1 and the second domain comprises a moiety chosen from DNMT1, DNMt3a/3L, MQ1, KRAB, G9A, HDAC8, LSD1, EZH2, or FOG1.
[0083] 50. The expression repressor of any of embodiments 35-49, wherein the CRISPR/Cas molecule comprises a Cas protein or Cpf1 protein chosen from Table 1 or a variant (e.g., mutant) of any thereof.
[0084] 51. The expression repressor of any of embodiments 35-50, wherein the CRISPR/Cas molecule comprises a catalytically inactive CRISPR/Cas protein, e.g., dCas9.
[0085] 52. The expression repressor of any of the preceding embodiments, which: (i) comprises one or more nuclear localization signal sequences (NLS), or (ii) does not comprise an NLS.
[0086] 53. The expression repressor of any of the preceding embodiments, comprising a first NLS at the N terminus, e.g., wherein the first NLS has a sequence of SEQ ID NO: 86.
[0087] 54. The expression repressor of any of the preceding embodiments, comprising an NLS, e.g., a second NLS, at the C terminus, e.g., having a sequence of SEQ ID NO: 87.
[0088] 55. The expression repressor of any of the preceding embodiments, wherein the first and the second NLS have the same sequence.
[0089] 56. The expression repressor of any of embodiments 52-55, wherein the first and the second NLS have different sequences.
[0090] 57. The expression repressor of any of the preceding embodiments, which comprises an epitope tag.
[0091] 58. The expression repressor of embodiment 57, wherein the epitope tag is an HA tag, e.g., an HA tag comprising an amino acid seq of SEQ ID NO: 80.
[0092] 59. The expression repressor of any of embodiments 37-58, wherein the anchor sequence comprises the sequence of SEQ ID NO: 81 or 82, or a sequence with no more than 8, 7, 6, 5, 4, 3, 2, or 1 alteration relative thereto.
[0093] 60. The expression repressor of any of embodiments 37-58, wherein the anchor sequence comprises a sequence according to SEQ ID NO: 83 or 84, or a sequence with no more than 8, 7, 6, 5, 4, 3, 2, or 1 alteration relative thereto.
[0094] 61. The expression repressor of any of embodiments 37-60, wherein the anchor sequence is on the same chromosome as the gene.
[0095] 62. The expression repressor of any of embodiments 37-61, wherein the anchor sequence is upstream of the target gene (e.g., upstream of the TSS or upstream of the promoter).
[0096] 63. The expression repressor of any of embodiments 37-61 wherein the anchor sequence is downstream of the target gene (e.g., downstream of the TSS or upstream of the promoter).
[0097] 64. The expression repressor of any of the preceding embodiments, wherein binding of the expression repressor to the target gene locus decreases expression of the target gene in a cell by 10, 20, 30, 40, 50, 60, 70, 80, 90, or 100% compared to expression of the target gene in the absence of the expression repressor.
[0098] 65. The expression repressor of any of the preceding embodiments, wherein binding of the expression repressor to the target gene locus appreciably decreases expression of the target gene for a time period of at least 1, 2, 3, 4, 5, 6, 7, 8, 9, 10, 11, 12, 13, 14, 15, 16, 17, 18, 19, 20, 21, or 22 days.
[0099] 66. The expression repressor of any of embodiments 18-65, wherein the first and/or second repressor domain comprises a DNA methyltransferase, a histone methyltransferase, a histone deacetylase, a histone demethylase, or a recruiter of a histone modifying complex.
[0100] 67. An expression repression system comprising:
   [0101] a first expression repressor comprising a first DNA-targeting moiety and a first repressor domain, and
   [0102] a second expression repressor comprising a second DNA-targeting moiety and a second repressor domain,
   [0103] wherein the first DNA-targeting moiety specifically binds a first DNA sequence, and the second DNA-targeting moiety specifically binds a second DNA sequence different from the first DNA sequence, and
   [0104] wherein the first repressor domain is different from the second repressor domain.
[0105] 68. An expression repression system comprising:
   [0106] a first expression repressor comprising a first DNA-targeting moiety and a first repressor domain, and
   [0107] a second expression repressor comprising a second DNA-targeting moiety and a second repressor domain,
   [0108] wherein the first or second repressor domain comprises an MQ1 domain or functional variant or fragment thereof,
   [0109] wherein the first repressor domain is different from the second repressor domain.
[0110] 69. An expression repression system of embodiment 67 or 68, wherein the first expression repressor further comprises a third repressor domain.
[0111] 70. An expression repression system of any of embodiments 67-69, wherein the second expression repressor further comprises a fourth repressor domain.
[0112] 71. The expression repression system of any of embodiments 67-70, wherein the first DNA-targeting moiety specifically binds a first DNA sequence, and the second DNA-targeting moiety specifically binds a second DNA sequence different from the first DNA sequence.
[0113] 72. The expression repression system of any of embodiments 67-70, wherein the first DNA-targeting moiety and the second DNA-targeting moiety specifically bind the same DNA sequence.
[0114] 73. The expression repression system of any of embodiments 67-72,
   [0115] wherein the first DNA-targeting moiety comprises a first CRISPR/Cas molecule comprising a first CRISPR/Cas protein and first guide RNA, and the second DNA-targeting moiety comprises a second CRISPR/Cas molecule comprising a second CRISPR/Cas protein and a second guide RNA.
[0116] 74. The expression repression system of embodiment 73,
   [0117] wherein the first CRISPR/Cas protein does not bind the second guide RNA, e.g., binds with a K_{D} of at least 10, 20, 50, 100, 1000, or 10,000 nM, and the second CRISPR/Cas protein does not bind the first guide RNA, e.g., binds with a K_{D} of at least 10, 20, 50, 100, 1000, or 10,000 nM.
[0118] 75. The expression repression system of either of embodiments 73 or 74:
   [0119] wherein the first CRISPR/Cas protein comprises a different amino acid sequence than the second CRISPR/Cas protein.
[0120] 76. The expression repression system of any of embodiments 67-75, wherein the first or second DNA-targeting moiety comprises a CRISPR/Cas molecule comprising a Cas protein or Cpf1 protein chosen from Table 1 or a variant (e.g., mutant) of any thereof.
[0121] 77. The expression repression system of any of embodiments 67-76, wherein the first DNA-targeting moiety comprises a first CRISPR/Cas molecule comprising a Cas protein or Cpf1 protein chosen from Table 1 or a variant (e.g., mutant) of any thereof, and the second DNA-targeting moiety comprises a second CRISPR/Cas molecule comprising a different Cas protein or Cpf1 protein chosen from Table 1 or a variant (e.g., mutant) of any thereof.
[0122] 78. The expression repression system of any of embodiments 70-77, wherein the first, second, third, or fourth repressor domain comprises a histone methyltransferase activity.
[0123] 79. The expression repression system of embodiment 70-78, wherein the first, second, third, or fourth repressor domain comprises a protein chosen from SETDB1, SETDB2, EHMT2 (i.e., G9A), EHMT1 (i.e., GLP), SUV39H1, EZH2, EZH1, SUV39H2, SETD8, SUV420H1, SUV420H2, or a functional variant or fragment of any thereof, e.g., a SET domain of any thereof.
[0124] 80. The expression repression system of any of embodiments 70-79, wherein the first, second, third, or fourth repressor domain comprises a histone demethylase activity (e.g., a lysine demethylase activity).
[0125] 81. The expression repression system of any of embodiment 70-80, wherein the first, second, third, or fourth repressor domain comprises a protein chosen from KDM1A (i.e., LSD1), KDM1B (i.e., LSD2), KDM2A, KDM2B, KDM5A, KDM5B, KDM5C, KDM5D, KDM4B, N066 (or a functional variant or fragment of any thereof.
[0126] 82. The expression repression system of any of embodiments 70-81, wherein the first, second, third, or fourth repressor domain comprises a histone deacetylase activity.
[0127] 83. The expression repression system of embodiment 70-82, wherein the first, second, third, or fourth repressor domain comprises a protein chosen from HDAC1, HDAC2, HDAC3, HDAC4, HDAC5, HDAC6, HDAC7, HDAC8, HDAC9, HDAC10, HDAC11, SIRT1, SIRT2, SIRT3, SIRT4, SIRT5, SIRT6, SIRT7, SIRT8, SIRT9, or a functional variant or fragment of any thereof.
[0128] 84. The expression repression system of any of embodiments 70-83, wherein the first, second, second, third, or fourth repressor domain comprises a DNA methyltransferase activity.
[0129] 85. The expression repression system of embodiment 70-84, wherein the first, second, third, or fourth repressor domain comprises a protein chosen from MQ1, DNMT1, DNMT3A1, DNMT3A2, DNMT3B1, DNMT3B2, DNMT3B3, DNMT3B4, DNMT3B5, DNMT3B6, DNMT3L, or a functional variant or fragment of any thereof.
[0130] 86. The expression repression system of any of embodiments 70-85, wherein the first, second, third, or fourth repressor domain comprises a transcription repressor activity.
[0131] 87. The expression repression system of embodiment 70-86, wherein the first, second, third, or fourth repressor domain comprises a protein chosen from KRAB, MeCP2, HP1, RBBP4, REST, FOG1, SUZ12, or a functional variant or fragment of any thereof.
[0132] 88. The expression repression system of any of embodiments 67-87, wherein:
   [0133] the first repressor domain comprises a protein chosen from SETDB1, SETDB2, EHMT2 (i.e., G9A), EHMT1 (i.e., GLP), SUV39H1, EZH2, EZH1, SUV39H2, SETD8, SUV420H1, SUV420H2, KDM1A (i.e., LSD1), KDM1B (i.e., LSD2), KDM2A, KDM2B, KDM5A, KDM5B, KDM5C, KDM5D, KDM4B, N066, HDAC1, HDAC2, HDAC3, HDAC4, HDAC5, HDAC6, HDAC7, HDAC8, HDAC9, HDAC10, HDAC11, SIRT1, SIRT2, SIRT3, SIRT4, SIRT5, SIRT6, SIRT7, SIRT8, SIRT9, MQ1, DNMT1, DNMT3A1, DNMT3A2, DNMT3B1, DNMT3B2, DNMT3B3, DNMT3B4, DNMT3B5, DNMT3B6, DNMT3L, KRAB, MeCP2, HP1, RBBP4, REST, FOG1, SUZ12, or a functional variant or fragment thereof, and
   [0134] the second repressor domain comprises a different protein chosen from SETDB1, SETDB2, EHMT2 (i.e., G9A), EHMT1 (i.e., GLP), SUV39H1, EZH2, EZH1, SUV39H2, SETD8, SUV420H1, SUV420H2, KDM1A (i.e., LSD1), KDM1B (i.e., LSD2), KDM2A, KDM2B, KDM5A, KDM5B, KDM5C, KDM5D, KDM4B, N066, HDAC1, HDAC2, HDAC3, HDAC4, HDAC5, HDAC6, HDAC7, HDAC8, HDAC9, HDAC10, HDAC11, SIRT1, SIRT2, SIRT3, SIRT4, SIRT5, SIRT6, SIRT7, SIRT8, SIRT9, MQ1, DNMT1, DNMT3A1, DNMT3A2, DNMT3B1, DNMT3B2, DNMT3B3, DNMT3B4, DNMT3B5, DNMT3B6, DNMT3L, KRAB, MeCP2, HP1, RBBP4, REST, FOG1, SUZ12, or a functional variant or fragment thereof.
[0135] 89. The expression repression system of any of embodiments 69-88, wherein:
   [0136] (i) the first repressor domain comprises a protein chosen from SETDB1, SETDB2, EHMT2 (i.e., G9A), EHMT1 (i.e., GLP), SUV39H1, EZH2, EZH1, SUV39H2, SETD8, SUV420H1, SUV420H2, KDM1A (i.e., LSD1), KDM1B (i.e., LSD2), KDM2A, KDM2B, KDM5A, KDM5B, KDM5C, KDM5D, KDM4B, N066, HDAC1, HDAC2, HDAC3, HDAC4, HDAC5, HDAC6, HDAC7, HDAC8, HDAC9, HDAC10, HDAC11, SIRT1, SIRT2, SIRT3, SIRT4, SIRT5, SIRT6, SIRT7, SIRT8, SIRT9, MQ1, DNMT1, DNMT3A1, DNMT3A2, DNMT3B1, DNMT3B2, DNMT3B3, DNMT3B4, DNMT3B5, DNMT3B6, DNMT3L, KRAB, MeCP2, HP1, RBBP4, REST, FOG1, SUZ12, or a functional variant or fragment thereof, and
   [0137] (ii) the third repressor domain comprises a protein (e.g., a different protein) chosen from SETDB1, SETDB2, EHMT2 (i.e., G9A), EHMT1 (i.e., GLP), SUV39H1, EZH2, EZH1, SUV39H2, SETD8, SUV420H1, SUV420H2, KDM1A (i.e., LSD1), KDM1B (i.e., LSD2), KDM2A, KDM2B, KDM5A, KDM5B, KDM5C, KDM5D, KDM4B, N066, HDAC1, HDAC2, HDAC3, HDAC4, HDAC5, HDAC6, HDAC7, HDAC8, HDAC9, HDAC10, HDAC11, SIRT1, SIRT2, SIRT3, SIRT4, SIRT5, SIRT6, SIRT7, SIRT8, SIRT9, MQ1, DNMT1, DNMT3A1, DNMT3A2, DNMT3B1, DNMT3B2, DNMT3B3, DNMT3B4, DNMT3B5, DNMT3B6, DNMT3L, KRAB, MeCP2, HP1, RBBP4, REST, FOG1, SUZ12, or a functional variant or fragment thereof.
[0138] 90. The expression repression system of any of embodiments 69-89, wherein:
   [0139] (i) the first repressor domain comprises a protein chosen from SETDB1, SETDB2, EHMT2 (i.e., G9A), EHMT1 (i.e., GLP), SUV39H1, EZH2, EZH1, SUV39H2, SETD8, SUV420H1, SUV420H2, KDM1A (i.e., LSD1), KDM1B (i.e., LSD2), KDM2A, KDM2B, KDM5A, KDM5B, KDM5C, KDM5D, KDM4B, N066, HDAC1, HDAC2, HDAC3, HDAC4, HDAC5, HDAC6, HDAC7, HDAC8, HDAC9, HDAC10, HDAC11, SIRT1, SIRT2, SIRT3, SIRT4, SIRT5, SIRT6, SIRT7, SIRT8, SIRT9, MQ1, DNMT1, DNMT3A1, DNMT3A2, DNMT3B1, DNMT3B2, DNMT3B3, DNMT3B4, DNMT3B5, DNMT3B6, DNMT3L, KRAB, MeCP2, HP1, RBBP4, REST, FOG1, SUZ12, or a functional variant or fragment thereof,
   [0140] (ii) the second repressor domain comprises a protein (e.g., different protein) chosen from SETDB1, SETDB2, EHMT2 (i.e., G9A), EHMT1 (i.e., GLP), SUV39H1, EZH2, EZH1, SUV39H2, SETD8, SUV420H1, SUV420H2, KDM1A (i.e., LSD1), KDM1B (i.e., LSD2), KDM2A, KDM2B, KDM5A, KDM5B, KDM5C, KDM5D, KDM4B, N066, HDAC1, HDAC2, HDAC3, HDAC4, HDAC5, HDAC6, HDAC7, HDAC8, HDAC9, HDAC10, HDAC11, SIRT1, SIRT2, SIRT3, SIRT4, SIRT5, SIRT6, SIRT7, SIRT8, SIRT9, MQ1, DNMT1, DNMT3A1, DNMT3A2, DNMT3B1, DNMT3B2, DNMT3B3, DNMT3B4, DNMT3B5, DNMT3B6, DNMT3L, KRAB, MeCP2, HP1, RBBP4, REST, FOG1, SUZ12, or a functional variant or fragment thereof, and
   [0141] (iii) the third repressor domain comprises a protein chosen from SETDB1, SETDB2, EHMT2 (i.e., G9A), EHMT1 (i.e., GLP), SUV39H1, EZH2, EZH1, SUV39H2, SETD8, SUV420H1, SUV420H2, KDM1A (i.e., LSD1), KDM1B (i.e., LSD2), KDM2A, KDM2B, KDM5A, KDM5B, KDM5C, KDM5D, KDM4B, N066, HDAC1, HDAC2, HDAC3, HDAC4, HDAC5, HDAC6, HDAC7, HDAC8, HDAC9, HDAC10, HDAC11, SIRT1, SIRT2, SIRT3, SIRT4, SIRT5, SIRT6, SIRT7, SIRT8, SIRT9, MQ1, DNMT1, DNMT3A1, DNMT3A2, DNMT3B1, DNMT3B2, DNMT3B3, DNMT3B4, DNMT3B5, DNMT3B6, DNMT3L, KRAB, MeCP2, HP1, RBBP4, REST, FOG1, SUZ12, or a functional variant or fragment thereof.
[0142] 91. The expression repression system of any of embodiments 70-90, wherein:
   [0143] (i) the first repressor domain comprises a protein chosen from SETDB1, SETDB2, EHMT2 (i.e., G9A), EHMT1 (i.e., GLP), SUV39H1, EZH2, EZH1, SUV39H2, SETD8, SUV420H1, SUV420H2, KDM1A (i.e., LSD1), KDM1B (i.e., LSD2), KDM2A, KDM2B, KDM5A, KDM5B, KDM5C, KDM5D, KDM4B, N066, HDAC1, HDAC2, HDAC3, HDAC4, HDAC5, HDAC6, HDAC7, HDAC8, HDAC9, HDAC10, HDAC11, SIRT1, SIRT2, SIRT3, SIRT4, SIRT5, SIRT6, SIRT7, SIRT8, SIRT9, MQ1, DNMT1, DNMT3A1, DNMT3A2, DNMT3B1, DNMT3B2, DNMT3B3, DNMT3B4, DNMT3B5, DNMT3B6, DNMT3L, KRAB, MeCP2, HP1, RBBP4, REST, FOG1, SUZ12, or a functional variant or fragment thereof,
   [0144] (ii) the second repressor domain comprises a protein (e.g., a different protein) chosen from SETDB1, SETDB2, EHMT2 (i.e., G9A), EHMT1 (i.e., GLP), SUV39H1, EZH2, EZH1, SUV39H2, SETD8, SUV420H1, SUV420H2, KDM1A (i.e., LSD1), KDM1B (i.e., LSD2), KDM2A, KDM2B, KDM5A, KDM5B, KDM5C, KDM5D, KDM4B, N066, HDAC1, HDAC2, HDAC3, HDAC4, HDAC5, HDAC6, HDAC7, HDAC8, HDAC9, HDAC10, HDAC11, SIRT1, SIRT2, SIRT3, SIRT4, SIRT5, SIRT6, SIRT7, SIRT8, SIRT9, MQ1, DNMT1, DNMT3A1, DNMT3A2, DNMT3B1, DNMT3B2, DNMT3B3, DNMT3B4, DNMT3B5, DNMT3B6, DNMT3L, KRAB, MeCP2, HP1, RBBP4, REST, FOG1, SUZ12, or a functional variant or fragment thereof,
   [0145] (iii) the third repressor domain comprises a protein chosen from SETDB1, SETDB2, EHMT2 (i.e., G9A), EHMT1 (i.e., GLP), SUV39H1, EZH2, EZH1, SUV39H2, SETD8, SUV420H1, SUV420H2, KDM1A (i.e., LSD1), KDM1B (i.e., LSD2), KDM2A, KDM2B, KDM5A, KDM5B, KDM5C, KDM5D, KDM4B, N066, HDAC1, HDAC2, HDAC3, HDAC4, HDAC5, HDAC6, HDAC7, HDAC8, HDAC9, HDAC10, HDAC11, SIRT1, SIRT2, SIRT3, SIRT4, SIRT5, SIRT6, SIRT7, SIRT8, SIRT9, MQ1, DNMT1, DNMT3A1, DNMT3A2, DNMT3B1, DNMT3B2, DNMT3B3, DNMT3B4, DNMT3B5, DNMT3B6, DNMT3L, KRAB, MeCP2, HP1, RBBP4, REST, FOG1, SUZ12, or a functional variant or fragment thereof and
   [0146] (iv) the fourth repressor domain comprises a protein (e.g., a different protein) chosen from SETDB1, SETDB2, EHMT2 (i.e., G9A), EHMT1 (i.e., GLP), SUV39H1, EZH2, EZH1, SUV39H2, SETD8, SUV420H1, SUV420H2, KDM1A (i.e., LSD1), KDM1B (i.e., LSD2), KDM2A, KDM2B, KDM5A, KDM5B, KDM5C, KDM5D, KDM4B, N066, HDAC1, HDAC2, HDAC3, HDAC4, HDAC5, HDAC6, HDAC7, HDAC8, HDAC9, HDAC10, HDAC11, SIRT1, SIRT2, SIRT3, SIRT4, SIRT5, SIRT6, SIRT7, SIRT8, SIRT9, MQ1, DNMT1, DNMT3A1, DNMT3A2, DNMT3B1, DNMT3B2, DNMT3B3, DNMT3B4, DNMT3B5, DNMT3B6, DNMT3L, KRAB, MeCP2, HP1, RBBP4, REST, FOG1, SUZ12, or a functional variant or fragment thereof.
[0147] 92. The expression repression system of any of embodiments 70-91, wherein:
   [0148] (i) the second repressor domain comprises a protein chosen from SETDB1, SETDB2, EHMT2 (i.e., G9A), EHMT1 (i.e., GLP), SUV39H1, EZH2, EZH1, SUV39H2, SETD8, SUV420H1, SUV420H2, KDM1A (i.e., LSD1), KDM1B (i.e., LSD2), KDM2A, KDM2B, KDM5A, KDM5B, KDM5C, KDM5D, KDM4B, N066, HDAC1, HDAC2, HDAC3, HDAC4, HDAC5, HDAC6, HDAC7, HDAC8, HDAC9, HDAC10, HDAC11, SIRT1, SIRT2, SIRT3, SIRT4, SIRT5, SIRT6, SIRT7, SIRT8, SIRT9, MQ1, DNMT1, DNMT3A1, DNMT3A2, DNMT3B1, DNMT3B2, DNMT3B3, DNMT3B4, DNMT3B5, DNMT3B6, DNMT3L, KRAB, MeCP2, HP1, RBBP4, REST, FOG1, SUZ12, or a functional variant or fragment thereof, and
   [0149] (ii) the fourth repressor domain comprises a protein (e.g., a different protein) chosen from SETDB1, SETDB2, EHMT2 (i.e., G9A), EHMT1 (i.e., GLP), SUV39H1, EZH2, EZH1, SUV39H2, SETD8, SUV420H1, SUV420H2, KDM1A (i.e., LSD1), KDM1B (i.e., LSD2), KDM2A, KDM2B, KDM5A, KDM5B, KDM5C, KDM5D, KDM4B, N066, HDAC1, HDAC2, HDAC3, HDAC4, HDAC5, HDAC6, HDAC7, HDAC8, HDAC9, HDAC10, HDAC11, SIRT1, SIRT2, SIRT3, SIRT4, SIRT5, SIRT6, SIRT7, SIRT8, SIRT9, MQ1, DNMT1, DNMT3A1, DNMT3A2, DNMT3B1, DNMT3B2, DNMT3B3, DNMT3B4, DNMT3B5, DNMT3B6, DNMT3L, KRAB, MeCP2, HP1, RBBP4, REST, FOG1, SUZ12, or a functional variant or fragment thereof.
[0150] 93. The expression repression system of any of embodiments 67-92, wherein the first repressor domain comprises a histone methyltransferase activity and the second repressor domain comprises a histone demethylase activity.
[0151] 94. The expression repression system of any of embodiments 67-92, wherein the first repressor domain comprises a histone methyltransferase activity and the second repressor domain comprises a histone deacetylase activity.
[0152] 95. The expression repression system of any of embodiments 67-92, wherein the first repressor domain comprises a histone methyltransferase activity and the second repressor domain comprises a DNA methyltransferase activity.
[0153] 96. The expression repression system of any of embodiments 67-92, wherein the first repressor domain comprises a histone methyltransferase activity and the second repressor domain comprises a DNA demethylase activity.
[0154] 97. The expression repression system of any of embodiments 67-92, wherein the first repressor domain comprises a histone methyltransferase activity and the second repressor domain comprises a transcription repressor activity.
[0155] 98. The expression repression system of any of embodiments 67-92, wherein the first repressor domain comprises a histone methyltransferase activity and the second repressor domain comprises a histone methyltransferase activity (e.g., wherein the histone methyltransferase activities are the same or different from each other).
[0156] 99. The expression repression system of any of embodiments 67-92, wherein the first repressor domain comprises a histone demethylase activity and the second repressor domain comprises a histone deacetylase activity.
[0157] 100. The expression repression system of any of embodiments 67-92, wherein the first repressor domain comprises a histone demethylase activity and the second repressor domain comprises a DNA methyltransferase activity.
[0158] 101. The expression repression system of any of embodiments 67-92, wherein the first repressor domain comprises a histone demethylase activity and the second repressor domain comprises a DNA demethylase activity.
[0159] 102. The expression repression system of any of embodiments 67-92, wherein the first repressor domain comprises a histone demethylase activity and the second repressor domain comprises a transcription repressor activity.
[0160] 103. The expression repression system of any of embodiments 67-92, wherein the first repressor domain comprises a histone demethylase activity and the second repressor domain comprises a histone demethylase activity (e.g., wherein the histone demethylase activities are the same or different from each other).
[0161] 104. The expression repression system of any of embodiments 67-92, wherein the first repressor domain comprises a histone deacetylase activity and the second repressor domain comprises a DNA methyltransferase activity.
[0162] 105. The expression repression system of any of embodiments 67-92, wherein the first repressor domain comprises a histone deacetylase activity and the second repressor domain comprises a DNA demethylase activity.
[0163] 106. The expression repression system of any of embodiments 67-92, wherein the first repressor domain comprises a histone deacetylase activity and the second repressor domain comprises a transcription repressor activity.
[0164] 107. The expression repression system of any of embodiments 67-92, wherein the first repressor domain comprises a histone deacetylase activity and the second repressor domain comprises a histone deacetylase activity (e.g., wherein the histone deacetylase activities are the same or different from each other).
[0165] 108. The expression repression system of any of embodiments 67-92, wherein the first repressor domain comprises a DNA methyltransferase activity and the second repressor domain comprises a DNA demethylase activity.
[0166] 109. The expression repression system of any of embodiments 67-92, wherein the first repressor domain comprises a DNA methyltransferase activity and the second repressor domain comprises a transcription repressor activity.
[0167] 110. The expression repression system of any of embodiments 67-92, wherein the first repressor domain comprises a DNA methyltransferase activity and the second repressor domain comprises a DNA methyltransferase activity (e.g., wherein the DNA methyltransferase activities are the same or different from each other).
[0168] 111. The expression repression system of any of embodiments 67-92, wherein the first repressor domain comprises a DNA demethylase activity and the second repressor domain comprises a transcription repressor activity.
[0169] 112. The expression repression system of any of embodiments 67-92, wherein the first repressor domain comprises a DNA demethylase activity and the second repressor domain comprises a DNA demethylase activity (e.g., wherein the DNA demethylase activities are the same or different from each other).
[0170] 113. The expression repression system of any of embodiments 67-92, wherein the first repressor domain comprises a transcription repressor activity and the second repressor domain comprises a transcription repressor activity (e.g., wherein the transcription repressor activities are the same or different from each other).
[0171] 114. The expression repression system of any of embodiments 67-113, wherein:
   [0172] the first repressor domain comprises a protein selected from: KRAB, a SET domain (e.g., the SET domain of SETDB1, EZH2, G9A, or SUV39H1), histone demethylase LSD1, FOG1 (e.g., the N-terminal residues of FOG1), KAP1, or a functional variant or fragment of any thereof; and
   [0173] the second repressor domain comprises a protein selected from: DNMT3A (e.g., human DNMT3A), DNMT3B, DNMT3L, DNMT3A/3L complex, bacterial MQ1, or a functional variant or fragment of any thereof.
[0174] 115. The expression repression system of any of embodiments 67-114, wherein:
   [0175] the first repressor domain comprises a protein selected from: EZH2, G9A, SUV39H1, FOG1, or a functional variant or fragment of any thereof; and
   [0176] the second repressor domain comprises a protein selected from: DNMT3A (e.g., human DNMT3A), DNMT3B, DNMT3L, DNMT3A/3L, DNMT1, LSD1, FOG1, KRAB, HDAC8, bacterial MQ1, or a functional variant or fragment of any thereof.
[0177] 116. The expression repression system of any of embodiments 67-115, wherein:
   [0178] (i) the first repressor domain comprises a protein selected from: KRAB, MeCP2, HP1, RBBP4, REST, FOG1, SUZ12, KDM1A (i.e., LSD1), KDM1B (i.e., LSD2), KDM2A, KDM2B, KDM5A, KDM5B, KDM5C, KDM5D, KDM4B, N066, SETDB1, SETDB2, EHMT2 (i.e., G9A), EHMT1 (i.e., GLP), SUV39H1, EZH2, EZH1, SUV39H2, SETD8, SUV420H1, SUV420H2, KAP1, HDAC8, MQ1, DNMT1, DNMT3A, DNMT3a/31, or a functional variant or fragment of any thereof; and
   [0179] (ii) the second repressor domain comprises a protein selected from: KRAB, FOG1, G9A, LSD1, HDAC8, EZH2, DNMT3a/31, MQ1, DNMT1, DBMT3A, DNMT3A1, DNMT3A2, DNMT3B1, DNMT3B2, DNMT3B3, DNMT3B4, DNMT3B5, DNMT3B6, DNMT3L or a functional variant or fragment of any thereof.
[0180] 117. The expression repression system of any of embodiments 67-116, wherein the first repressor domain comprises KRAB, and the second repressor domain comprises DNMT3A (e.g., human DNMT3A).
[0181] 118. The expression repression system of any of embodiments 67-115, wherein the first repressor domain comprises G9A or a functional variant or fragment thereof, and the second repressor domain comprises KRAB or a functional variant or fragment thereof.
[0182] 119. The expression repression system of any of embodiments 67-118, wherein the first repressor domain comprises LSD1 or a functional variant or fragment thereof and the second repressor domain comprises KRAB or a functional variant or fragment thereof.
[0183] 120. The expression repression system of any of embodiments 67-119, wherein the first repressor domain comprises KRAB or a functional variant or fragment thereof and the second repressor domain comprises bacterial MQ1 or a functional variant or fragment thereof.
[0184] 121. The expression repression system of any of embodiments 67-120, wherein:
   [0185] the first repressor domain comprises G9A or a functional variant or fragment thereof, wherein optionally the first repressor domain is N-terminal of the first DNA-targeting moiety; and
   [0186] the second repressor domain comprises EZH2 or a functional variant or fragment thereof, wherein optionally the second repressor domain is N-terminal of the second DNA-targeting moiety.
[0187] 122. The expression repression system of any of embodiments 67-120, wherein:
   [0188] the first repressor domain of comprises LSD1 or a functional variant or fragment thereof, wherein optionally the first repressor domain is C-terminal of the first DNA-targeting moiety; and
   [0189] the second repressor domain comprises G9A or a functional variant or fragment thereof, wherein optionally the second repressor domain is N-terminal of the second DNA-targeting moiety.
[0190] 123. The expression repression system of any of embodiments 67-120, wherein:
   [0191] the first repressor domain comprises MQ1 or a functional variant or fragment thereof, wherein optionally the first repressor domain is C-terminal of the first DNA-targeting moiety; and
   [0192] the second repressor domain comprises HDAC8 or a functional variant or fragment thereof, wherein optionally the second repressor domain is C-terminal of the second DNA-targeting moiety.
[0193] 124. The expression repression system of any of embodiments 67-120, wherein:
   [0194] the first repressor domain comprises LSD1 or a functional variant or fragment thereof, wherein optionally the first repressor domain is C-terminal of the first DNA-targeting moiety; and
   [0195] the second repressor domain comprises HDAC8 or a functional variant or fragment thereof, wherein optionally the second repressor domain is C-terminal of the second DNA-targeting moiety.
[0196] 125. The expression repression system of any of embodiments 67-120, wherein:
   [0197] the first repressor domain comprises LSD1 or a functional variant or fragment thereof, wherein optionally the first repressor domain is C-terminal of the first DNA-targeting moiety; and
   [0198] the second repressor domain comprises EZH2 or a functional variant or fragment thereof, wherein optionally the second repressor domain is N-terminal of the second DNA-targeting moiety.
[0199] 126. The expression repression system of any of embodiments 67-120, wherein:
   [0200] the first repressor domain comprises EZH2 or a functional variant or fragment thereof, wherein optionally the first repressor domain is N-terminal of the first DNA-targeting moiety; and
   [0201] the second repressor domain comprises HDAC8 or a functional variant or fragment thereof, wherein optionally the second repressor domain is C-terminal of the second DNA-targeting moiety.
[0202] 127. The expression repression system of any of embodiments 67-120, wherein:
   [0203] the first repressor domain comprises G9A or a functional variant or fragment thereof, wherein optionally the first repressor domain is N-terminal of the first DNA-targeting moiety; and
   [0204] the second repressor domain comprises HDAC8 or a functional variant or fragment thereof, wherein optionally the second repressor domain is C-terminal of the second DNA-targeting moiety.
[0205] 128. The expression repression system of any of embodiments 69-120, wherein:
   [0206] the first repressor domain comprises EZH2 or a functional variant or fragment thereof, wherein optionally the first repressor domain is N-terminal of the first DNA-targeting moiety,
   [0207] the third repressor domain comprises KRAB or a functional variant or fragment thereof, wherein optionally the third repressor domain is C-terminal of the first DNA-targeting moiety; and
   [0208] the second repressor domain comprises MQ1 or a functional variant or fragment thereof, wherein optionally the second repressor domain is C-terminal of the second DNA-targeting moiety.
[0209] 129. The expression repression system of any of embodiments 69-120, wherein:
   [0210] the first repressor domain comprises G9A or a functional variant or fragment thereof, wherein optionally the first repressor domain is N-terminal of the first DNA-targeting moiety,
   [0211] the third repressor domain comprises KRAB or a functional variant or fragment thereof, wherein optionally the third repressor domain is C-terminal of the first DNA-targeting moiety, and
   [0212] the second repressor domain comprises MQ1 or a functional variant or fragment thereof, wherein optionally the second repressor domain is C-terminal of the second DNA-targeting moiety
[0213] 130. The expression repression system of any of embodiments 69-120, wherein:
   [0214] the first repressor domain comprises EZH2 or a functional variant or fragment thereof, wherein optionally the first repressor domain is N-terminal of the first DNA-targeting moiety,
   [0215] the third repressor domain comprises KRAB or a functional variant or fragment thereof, wherein optionally the third repressor domain is C-terminal of the first DNA-targeting moiety, and
   [0216] the second repressor domain comprises HDAC8 or a functional variant or fragment thereof, wherein optionally the second repressor domain is C-terminal of the second DNA-targeting moiety.
[0217] 131. The expression repression system of any of embodiments 69-120, wherein:
   [0218] the first repressor domain comprises FOG1 or a functional variant or fragment thereof, wherein optionally the first repressor domain is N-terminal of the first DNA-targeting moiety,
   [0219] the third repressor domain comprises FOG1 or a functional variant or fragment thereof, wherein optionally the third repressor domain is C-terminal of the first DNA-targeting moiety, and
   [0220] the second repressor domain comprises KRAB or a functional variant or fragment thereof, wherein optionally the second repressor domain is C-terminal of the second DNA-targeting moiety.
[0221] 132. The expression repression system of any of embodiments 69-120, wherein:
   [0222] the first repressor domain comprises EZH2 or a functional variant or fragment thereof, wherein optionally the first repressor domain is N-terminal of the first DNA-targeting moiety,
   [0223] the third repressor domain comprises KRAB or a functional variant or fragment thereof, wherein optionally the third repressor domain is C-terminal of the first DNA-targeting moiety, and
   [0224] the second repressor domain comprises LSD1 or a functional variant or fragment thereof, wherein optionally the second repressor domain is C-terminal of the second DNA-targeting moiety.
[0225] 133. The expression repression system of any of embodiments 69-130, wherein:
   [0226] the first repressor domain comprises G9A or a functional variant or fragment thereof, wherein optionally the first repressor domain is N-terminal of the first DNA-targeting moiety,
   [0227] the third repressor domain comprises KRAB or a functional variant or fragment thereof, wherein optionally the third repressor domain is C-terminal of the first DNA-targeting moiety, and
   [0228] the second repressor domain comprises LSD1 or a functional variant or fragment thereof, wherein optionally the second repressor domain is C-terminal of the second DNA-targeting moiety.
[0229] 134. The expression repression system of any of embodiments 67-133, wherein the first DNA-targeting moiety is selected from a TAL effector molecule, a CRISPR/Cas molecule, a zinc finger domain, a tetR domain, a meganuclease, or an oligonucleotide.
[0230] 135. The expression repression system of any of embodiments 67-134, wherein the second DNA-targeting moiety is selected from a TAL effector molecule, a CRISPR/Cas molecule, a zinc finger domain, a tetR domain, a meganuclease, or an oligonucleotide.
[0231] 136. The expression repression system of any of embodiments 67-135, wherein the first DNA-targeting moiety is or comprises a CRISPR/Cas molecule comprising a CRISPR/Cas protein (e.g., that is or comprises a Cas protein or Cpf1 protein chosen from Table 1 or a variant (e.g., mutant) of any thereof) and a guide RNA.
[0232] 137. The expression repression system of any of embodiments 67-136, wherein the second DNA-targeting moiety is or comprises a CRISPR/Cas molecule comprising a CRISPR/Cas protein (e.g., that is or comprises a Cas protein or Cpf1 protein chosen from Table 1 or a variant (e.g., mutant) of any thereof) and a guide RNA.
[0233] 138. The expression repression system of any of embodiments 67-137, wherein:
   [0234] the first DNA-targeting moiety is or comprises a CRISPR/Cas molecule comprising a CRISPR/Cas protein that is or comprises a Cas protein or Cpf1 protein chosen from Table 1 or a variant (e.g., mutant) of any thereof), and
   [0235] the second DNA-targeting moiety is or comprises a CRISPR/Cas molecule comprising a different CRISPR/Cas protein that is or comprises a Cas protein or Cpf1 protein chosen from Table 1 or a variant (e.g., mutant) of any thereof).
[0236] 139. The expression repression system of any of embodiments 135-138, wherein:
   [0237] the first DNA-targeting moiety is or comprises a CRISPR/Cas molecule encoded by a nucleic acid sequence of SEQ ID NO: 45 or 89, and
   [0238] the second DNA-targeting moiety is or comprises a CRISPR/Cas molecule encoded by a nucleic acid sequence of SEQ ID NO: 45 or 89.
[0239] 140. The expression repression system of any of embodiments 135-138, wherein:
   [0240] the first DNA-targeting moiety is or comprises a CRISPR/Cas molecule comprising an amino acid sequence of SEQ ID NO: 46 or 88, and
[0241] the second DNA-targeting moiety is or comprises a CRISPR/Cas molecule comprising an amino acid sequence of SEQ ID NO: 46 or 88.
[0242] 141. The expression repression system of any of embodiments 67-140, wherein the first or the second DNA-targeting moiety specifically binds to a promoter sequence or to DNA proximal to a promoter sequence, e.g., a promoter sequence operably linked to a target gene.
[0243] 142. The expression repression system of any of embodiments 67-141, wherein the first or the second DNA-targeting moiety specifically binds to an enhancer sequence or to DNA proximal to an enhancer sequence, e.g., an enhancer sequence that affects expression of and/or is operably linked to a target gene.
[0244] 143. The expression repression system of any of embodiments 67-142, wherein the first or the second DNA targeting moiety specifically binds to a target gene, e.g., sequence comprised between the transcription start site and stop codon of a target gene.
[0245] 144. The expression repression system of any of embodiments 67-143, wherein the first or the second DNA targeting moiety specifically binds to the transcription start site of a target gene.
[0246] 145. The expression repression system of any of embodiments 67-144, wherein the first or the second DNA targeting moiety specifically binds to an intron, e.g., a splice site associated with an intron, of a target gene.
[0247] 146. The expression repression system of any of embodiments 67-145, wherein the first or the second DNA targeting moiety specifically binds to an exon of a target gene.
[0248] 147. The expression repression system of any of embodiments 67-146, wherein first or the second DNA targeting moiety specifically binds to an anchor sequence.
[0249] 148. The expression repression system of embodiment 147, wherein the anchor sequence comprises the sequence of SEQ ID NO: 81 or 82, or a sequence with no more than 8, 7, 6, 5, 4, 3, 2, or 1 alterations relative thereto.
[0250] 149. The expression repression system of embodiment 147, wherein the anchor sequence comprises the sequence of SEQ ID NO: 83 or 84, or a sequence with no more than 8, 7, 6, 5, 4, 3, 2, or 1 alterations relative thereto.
[0251] 150. The expression repression system of any of embodiments 147-149, wherein the anchor sequence is on the same chromosome as the gene.
[0252] 151. The expression repression system of any of embodiments 147-149, wherein the anchor sequence is on a different chromosome as the gene.
[0253] 152. The expression repression system of any of embodiments 147-151, wherein the anchor sequence is upstream of the target gene (e.g., upstream of the TSS or upstream of the promoter).
[0254] 153. The expression repression system of any of embodiments 148-151, wherein the anchor sequence is downstream of the target gene (e.g., downstream of the TSS or upstream of the promoter).
[0255] 154. The expression repression system of any of embodiments 67-141, wherein the first DNA sequence is a first site within or proximal to a promoter operably linked to a target gene and the second DNA sequence is a second site within or proximal to the promoter operably linked to the target gene.
[0256] 155. The expression repression system of any of embodiments 67-142, wherein the first DNA sequence is within or proximal to a promoter operably linked to a target gene and the second DNA sequence is a within or proximal to an enhancer that affects expression of or is operably linked to the target gene.
[0257] 156. The expression repression system of any of embodiments 67-142, wherein the first DNA sequence is within or proximal to an enhancer that affects expression of or is operably linked to a target gene and the second DNA sequence is a within or proximal to a promoter operably linked to the target gene.
[0258] 157. The expression repression system of any of embodiments 67-141 or 143, wherein the first DNA sequence comprises the transcription start site of a target gene and the second DNA sequence is within or proximal to a promoter operably linked to the target gene.
[0259] 158. The expression repression system of any of embodiments 67-140, 142 or 143, wherein the first DNA sequence comprises the transcription start site of a target gene and the second DNA sequence is within or proximal to an enhancer that affects expression of or is operably linked to the target gene.
[0260] 159. The expression repression system of any of embodiments 67-141 or 143, wherein the first DNA sequence within or proximal to a promoter operably linked to a target gene and the second DNA sequence is the transcription start site of the target gene.
[0261] 160. The expression repression system of any of embodiments 67-140, 142, or 143, wherein the first DNA sequence is within or proximal to an enhancer that affects expression of or is operably linked to a target gene and the second DNA sequence is the transcription start site of the target gene.
[0262] 161. The expression repression system of any of embodiments 67-160, wherein the distance between the first DNA sequence and the second DNA sequence is at least 1, 2, 3, 4, 5, 6, 7, 8, 9, 10, 11, 12, 13, 14, 15, 16, 17, 18, 19, 20, 25, 30, 35, 40, 45, 50, 55, 60, 65, 70, 75, 80, 85, 90, 95, 100, 110, 120, 130, 140, 150, 160, 170, 180, 190, 200, 210, 220, 230, 240, 250, 260, 270, 280, 290, 300, 310, 320, 330, 340, 350, 360, 370, 380, 390, 400, 410, 420, 430, 440, 450, 460, 470, 480, 490, 500, 550, 600, 650, 700, 750, 800, 850, 900, 950, or 1000 base pairs or any size therebetween, e.g., 20-500 base pairs.
[0263] 162. The expression repression system of any of embodiments 67-161, wherein the distance between the first DNA sequence and the second DNA sequence is no more than 100, 110, 120, 130, 140, 150, 160, 170, 180, 190, 200, 210, 220, 230, 240, 250, 260, 270, 280, 290, 300, 310, 320, 330, 340, 350, 360, 370, 380, 390, 400, 410, 420, 430, 440, 450, 460, 470, 480, 490, 500, 550, 600, 650, 700, 750, 800, 850, 900, 950, or 1000 base pairs or any size therebetween, e.g., 20-500 base pairs.
[0264] 163. The expression repression system of any of embodiments 67-162, wherein the first DNA sequence and the second DNA sequence are situated on different nucleic acids, e.g., different chromosomes.
[0265] 164. The expression repression system of any of embodiments 67-163, wherein the target gene is β-2-microglobulin, MYC, HSPA1B, GATA1, APOB, FOXP3, CXCL1, CXCL2, CXCL3, CXCL4, CXCL5, CXCL6, CXCL6, CXCL7, and/or CXCL8. 165. The expression repression system of any of embodiments 73-164, wherein the first guide RNA comprises a sequence specific to, e.g., complementary to, the first DNA sequence and the second guide RNA comprises a sequence specific to, e.g., complementary to, the second DNA sequence.
[0266] 166. The expression repression system of any of embodiments 67-165, wherein the first DNA-targeting moiety does not appreciably bind to the second DNA sequence and the second DNA-targeting moiety does not appreciably bind to the first DNA sequence.
[0267] 167. The expression repression system of any of embodiments 67-166, wherein the first DNA-targeting moiety binds the second DNA sequence with a K_{D} of at least 500, 600, 700, 800, 900, 1000, 2000, 5000, 10,000, or 100,000 nM, and the second DNA-targeting moiety binds the first DNA sequence with binds with a K_{D} of at least 500, 600, 700, 800, 900, 1000, 2000, 5000, 10,000, or 100,000 nM.
[0268] 168. The expression repression system of any of embodiments 67-167, wherein binding of the first expression repressor to the first DNA sequence decreases expression of a target gene, e.g., a target gene operably linked to the first DNA sequence, in a cell.
[0269] 169. The expression repression system of embodiment 168, wherein expression is decreased by 10, 20, 30, 40, 50, 60, 70, 80, 90, or 100% compared to expression in the absence of the first expression repressor, e.g., as measured by ELISA or as described in Examples 2-4.
[0270] 170. The expression repression system of any of embodiments 67-169, wherein binding of the first expression repressor to the first DNA sequence appreciably decreases expression of a target gene, e.g., a target gene operably linked to the first DNA sequence, for a time period of at least 1, 2, 3, 4, 5, 6, 7, 8, 9, 10, 11, 12, 13, 14, 15, 16, 17, 18, 19, 20, 21, 22, 23, 24, or 25 days, or at least 1, 2, 3, 4, 5, 6, 7, 8, 9, or 10 cell divisions, e.g., as measured by ELISA or as described in Examples 2-4.
[0271] 171. The expression repression system of any of embodiments 67-170, wherein binding of the second expression repressor to the second DNA sequence decreases expression of a target gene, e.g., a target gene operably linked to the second DNA sequence, in a cell.
[0272] 172. The expression repression system of embodiment 171, wherein expression is decreased by 10, 20, 30, 40, 50, 60, 70, 80, 90, or 100% compared to expression in the absence of the second expression repressor, e.g., as measured by ELISA or as described in Examples 2-4.
[0273] 173. The expression repression system of any of embodiments 67-172, wherein binding of the second expression repressor to the second DNA sequence appreciably decreases expression of a target gene, e.g., a target gene operably linked to the second DNA sequence, for a time period of at least 1, 2, 3, 4, 5, 6, 7, 8, 9, 10, 11, 12, 13, 14, 15, 16, 17, 18, 19, 20, 21, 22, 23, 24, or 25 days, or at least 1, 2, 3, 4, 5, 6, 7, 8, 9, or 10 cell divisions, e.g., as measured by ELISA or as described in Examples 2-4.
[0274] 174. The expression repression system of any of embodiments 67-173, wherein binding of the first expression repressor to the first DNA sequence and the second expression repressor to the second DNA sequence decreases expression of a target gene, e.g., a target gene operably linked to the first DNA sequence and/or the second DNA sequence, in a cell.
[0275] 175. The expression repression system of embodiment 174, wherein expression is decreased by 10, 20, 30, 40, 50, 60, 70, 80, 90, or 100% compared to expression in the absence of the first and second expression repressors, e.g., as measured by ELISA or as described in Examples 2-4.
[0276] 176. The expression repression system of any of embodiments 1-175, wherein binding of the first expression repressor to the first DNA sequence and the second expression repressor to the second DNA sequence appreciably decreases expression of a target gene, e.g., a target gene operably linked to the first DNA sequence, for a time period of at least 1, 2, 3, 4, 5, 6, 7, 8, 9, 10, 11, or 12 hours, or at least 1, 2, 3, 4, 5, 6, 7, 8, 9, 10, 11, 12, 13, 14, 15, 16, 17, 18, 19, 20, 21, 22, 23, 24, or 25 days, or at least 1, 2, 3, 4, 5, 6, 7, 8, 9, or 10 cell divisions, e.g., as measured by ELISA or as described in Examples 2-4.
[0277] 177. The expression repression system of any of embodiments 174-176, wherein the decrease in expression resulting from the binding of the first expression repressor to the first DNA sequence and the second expression repressor to the second DNA sequence is greater than the decrease in expression resulting from the binding of the first expression repressor to the first DNA sequence or the binding of the second expression repressor to the second DNA sequence individually.
[0278] 178. The expression repression system of embodiment 177, wherein the binding of the first expression repressor to the first DNA sequence and the second expression repressor to the second DNA sequence decreases expression 1.05× (i.e., 1.05 times), 1.1×, 1.15×, 1.2×, 1.25×, 1.3×, 1.35×, 1.4×, 1.45×, 1.5×, 1.6×, 1.7×, 1.8×, 1.9×, 2×, 3×, 4×, 5×, 6×, 7×, 8×, 9×, 10×, 20×, 50×, or 100× more than either the binding of the first expression repressor to the first DNA sequence or the binding of the second expression repressor to the second DNA sequence individually, e.g., as measured by ELISA or as described in Examples 2-4.
[0279] 179. The expression repression system of embodiment 174-178, wherein the decrease in expression resulting from the binding of the first expression repressor to the first DNA sequence and the second expression repressor to the second DNA sequence persists for a longer time (e.g., more hours, days, or cell divisions) than the decrease in expression resulting from the binding of the first expression repressor to the first DNA sequence or the binding of the second expression repressor to the second DNA sequence individually.
[0280] 180. The expression repression system of embodiment 179, wherein the binding of the first expression repressor to the first DNA sequence and the second expression repressor to the second DNA sequence decreases expression 1.05× (i.e., 1.05 times), 1.1×, 1.15×, 1.2×, 1.25×, 1.3×, 1.35×, 1.4×, 1.45×, 1.5×, 1.6×, 1.7×, 1.8×, 1.9×, 2×, 3×, 4×, 5×, 6×, 7×, 8×, 9×, 10×, 20×, 50×, or 100× longer (e.g., as measured in hours, days, or cell divisions) than either the binding of the first expression repressor to the first DNA sequence or the binding of the second expression repressor to the second DNA sequence individually, e.g., as measured by ELISA or as described in Examples 2-4.
[0281] 181. The expression repression system of any of embodiments 174-180, wherein the cell is dividing at a rate of no more than once per 24, 36, 48, 60, or 72 hours (and optionally, at least once per 24, 36, 48, 60, or 72 hours).
[0282] 182. The expression repression system of any of embodiments 174-181, wherein the cell is dividing at a rate of at least once per 24, 36, 48, 60, or 72 hours (and optionally, no more than once per 24, 36, 48, 60, or 72 hours).
[0283] 183. The expression repression system of any of embodiments 174-182, wherein expression is appreciably decreased indefinitely (e.g., for a time period greater than can be experimentally measured).
[0284] 184. The expression repression system of any of embodiments 67-183, wherein
   [0285] the first DNA-targeting moiety comprises an S. pyogenes CRISPR/Cas protein selected from Table 1 or variant (e.g., mutant) thereof, e.g., an S. pyogenes dCas9, e.g., a dCas9 comprising an amino acid sequence of SEQ ID NO: 46; or a S. aureus CRISPR/Cas protein selected from Table 1 or variant (e.g., mutant) thereof, e.g., an S. aureus dCas9, e.g., a dCas9 comprising an amino acid sequence of SEQ ID NO: 88 and
   [0286] the second DNA-targeting moiety comprises an S. pyogenes CRISPR/Cas protein selected from Table 1 or variant (e.g., mutant) thereof, e.g., an S. pyogenes dCas9, e.g., a dCas9 comprising an amino acid sequence of SEQ ID NO: 46; or a CRISPR/Cas molecule comprising a S. aureus CRISPR/Cas protein selected from Table 1 or variant (e.g., mutant) thereof, e.g., an S. aureus dCas9, e.g., a dCas9 comprising an amino acid sequence of SEQ ID NO: 88.
[0287] 185. The expression repression system of any of embodiments 67-184, wherein
   [0288] the first DNA-targeting moiety comprises a CRISPR/Cas molecule comprising a CRISPR/Cas protein, e.g., a catalytically inactive dCas9, e.g., a dCas9, e.g., a dCas9 comprising one or more mutations selected from D10A, D839A, H840A, and N863A mutations; and
   [0289] the second DNA-targeting moiety comprises a CRISPR/Cas molecule comprising a CRISPR/Cas protein, e.g., a catalytically inactive dCas9, e.g., a dCas9, e.g., a dCas9 comprising one or more mutations selected from D10A, D839A, H840A, and N863A mutations.
[0290] 186. The expression repression system of any of embodiments 67-185, wherein
   [0291] the first expression repressor comprises a first DNA-targeting moiety comprising a CRISPR/Cas molecule comprising an S. pyogenes CRISPR/Cas protein selected from Table 1 or variant (e.g., mutant) thereof, e.g., an S. pyogenes dCas9, and a first repressor domain comprising KRAB or a functional variant or fragment thereof; and
   [0292] the second expression repressor comprises a second DNA-targeting moiety comprising a CRISPR/Cas molecule comprising a S. aureus CRISPR/Cas protein selected from Table 1 or variant (e.g., mutant) thereof, e.g., an S. aureus dCas9, and a second repressor domain comprising bacterial MQ1 or a functional variant or fragment thereof.
[0293] 187. A polypeptide comprising:
   [0294] a DNA-targeting moiety; and
   [0295] a repressor domain comprising bacterial MQ1 or a functional variant or fragment thereof.
[0296] 188. A polypeptide comprising:
   [0297] a DNA-targeting moiety;
   [0298] a first repressor domain comprising MQ1, DNMT1, DNMT3a/31, KRAB, G9A, HDAC8, LSD1, EZH2, FOG1 or a functional variant or fragment thereof, and
   [0299] a second repressor domain comprising MQ1, DNMT1, DNMT3a/31, KRAB, G9A, HDAC8, LSD1, EZH2, FOG1 or a functional variant or fragment thereof.
[0300] 189. The polypeptide of embodiment 88a, wherein the DNA-targeting moiety is situated between the first repressor domain and the second repressor domain.
[0301] 190. A nucleic acid encoding the first expression repressor of the expression repression system of any of embodiments 67-189.
[0302] 191. A nucleic acid encoding the second expression repressor of the expression repression system of any of embodiments 67-189.
[0303] 192. A nucleic acid encoding the expression repression system, e.g., the first expression repressor and the second expression repressor, of any of embodiments 67-189.
[0304] 193. The nucleic acid of any of embodiments 190-192, which is an RNA, e.g., an mRNA.
[0305] 194. An expression repression system comprising:
   [0306] a first nucleic acid comprising a sequence encoding the first expression repressor of the expression repression system of any of embodiments 67-189; and
   [0307] a second nucleic acid comprising a sequence encoding the second expression repressor of the expression repression system of any of embodiments 67-189.
[0308] 195. A nucleic acid encoding the polypeptide of any of embodiments 187-189.
[0309] 196. The nucleic acid any of embodiments 190-193 or 195, wherein the nucleic acid comprises mRNA.
[0310] 197. A vector comprising the nucleic acid encoding the expression repressor or the expression repression system of any preceding embodiment.
[0311] 198. A lipid nanoparticle comprising the expression repressor, expression repression system, nucleic acid, mRNA, or vector of any of the preceding embodiments.
[0312] 199. The lipid nanoparticle of embodiment 198 comprising an ionizable lipid, e.g., a cationic lipid, e.g., MC3, SSOP.
[0313] 200. The lipid nanoparticle of embodiment 198 or 199, further comprising one or more of neutral lipids, ionizable amine-containing lipids, biodegradable alkyn lipids, steroids, phospholipids, polyunsaturated lipids, structural lipids (e.g., sterols), PEG, cholesterol, or polymer conjugated lipids.
[0314] 201. A reaction mixture comprising the expression repressor, expression repression system, nucleic acid, vector, or lipid nanoparticle of any of the preceding embodiments.
[0315] 202. The reaction mixture of embodiment 201 further comprising a cell.
[0316] 203. A cell comprising the expression repressor, expression repression system, nucleic acid, mRNA, vector, or nanoparticle of any of embodiments 1-202.
[0317] 204. The cell of embodiment 203, wherein the cell is selected from a hepatocyte, a neuronal cell, an endothelial cell, a myocyte, and a lymphocyte.
[0318] 205. A cell produced by a method comprising:
   [0319] providing i) a cell and ii) an expression repressor, expression repression system, polypeptide, nucleic acid, vector, lipid nanoparticle, or reaction mixture of any of embodiments 1-202; and
   [0320] contacting the cell with the expression repressor, expression repression system, polypeptide, nucleic acid, vector, lipid nanoparticle, or reaction mixture.
[0321] 206. A pharmaceutical composition comprising the expression repressor, expression repression system, nucleic acid, polypeptide, vector, lipid nanoparticle, or reaction mixture of any of embodiments 1-202, and at least one pharmaceutically acceptable excipient or carrier.
[0322] 207. The expression repression system of any of embodiments 1-202, wherein the first expression repressor further comprises an additional moiety selected from: a tagging or monitoring moiety, a cleavable moiety (e.g., a cleavable moiety positioned between a DNA-targeting moiety and a repressor domain or at the N- or C-terminal end of a polypeptide), a small molecule, a membrane translocating polypeptide, or a pharmacoagent moiety.
[0323] 208. The expression repression system of any of embodiments 1-202, wherein the second expression repressor further comprises an additional moiety selected from: a tagging or monitoring moiety, a cleavable moiety (e.g., a cleavable moiety positioned between a DNA-targeting moiety and a repressor domain or at the N- or C-terminal end of a polypeptide), a small molecule, a membrane translocating polypeptide, or a pharmacoagent moiety.
[0324] 209. A method of decreasing expression of a target genomic sequence in a cell, comprising:
   [0325] providing the expression repressor, expression repression system, nucleic acid, polypeptide, vector, lipid nanoparticle, reaction mixture, cell, or pharmaceutical composition of any of embodiments 1-204 or 206; and
   [0326] contacting the cell with the expression repressor, expression repression system, nucleic acid, polypeptide, vector, lipid nanoparticle, reaction mixture, cell, or pharmaceutical composition thereby decreasing expression of the target genomic sequence.
[0327] 210. A method of epigenetically modifying a target genomic sequence in a cell, comprising:
   [0328] providing an expression repressor, expression repression system, nucleic acid, vector, polypeptide, lipid nanoparticle, reaction mixture, cell, or pharmaceutical composition of any of embodiments 1-204 or 206; and
   [0329] contacting the cell with the expression repressor, expression repression system, nucleic acid, vector, polypeptide, lipid nanoparticle, reaction mixture, cell, or pharmaceutical composition,
   [0330] thereby epigenetically modifying the target genomic sequence.
[0331] 211. The method of f embodiment 209 or 210, wherein the target genomic sequence is:
   [0332] a target gene (e.g., a site within a target gene, e.g., an exon, intron, or splice site), e.g., the gene encoding β-2-microglobulin (β2M), the gene encoding MYC, the gene encoding HSPA1B, or the gene encoding GATA1,
   [0333] a transcription control element operably linked to a target gene, or
   [0334] an anchor sequence proximal to a target gene or associated with an anchor sequence-mediated conjunction operably linked to the target gene.
[0335] 212. The method of embodiment 211, wherein the epigenetic modification results in a decrease in expression of the target gene.
[0336] 213. The expression repressor, expression repression system, cell, pharmaceutical composition, nucleic acid, vector, or method of any of embodiments 174-212, wherein the cell is a mammalian cell, e.g., a human cell.
[0337] 214. The method of embodiment 213, wherein the method is performed ex vivo (e.g., in a sample from a subject) or in vivo (e.g., by administering the expression repression system to a subject).
[0338] 215. The method of any of embodiments 209-214, wherein expression is decreased by 10, 20, 30, 40, 50, 60, 70, 80, 90, or 100% compared to expression in an otherwise similar cell in the absence of the expression repression system.
[0339] 216. The method of any of embodiments 209-214, wherein expression is decreased by 10, 20, 30, 40, 50, 60, 70, 80, 90, or 100% compared to expression in an otherwise similar cell that has not been contacted with the expression repression system.
[0340] 217. The method of any of embodiments 209-216, wherein expression is decreased for a time period of at least 1, 2, 3, 4, 5, 6, 7, 8, 9, 10, 11, 12, 13, 14, 15, 16, 17, 18, 19, 20, 21, 22, 23, 24, or 25 days, or at least 1, 2, 3, 4, 5, 6, 7, 8, 9, or 10 cell divisions, e.g., as measured by ELISA or as described in Examples 2-4.
[0341] 218. The method of any of embodiments 215-217, wherein the decrease in expression comprises a decrease in the level of RNA, e.g., mRNA, encoded by the target gene.
[0342] 219. The method of any of embodiments 215-218, wherein the decrease in expression comprises a decrease in the level of a protein encoded by the target gene.
[0343] 220. The method of any of embodiments 209-219, wherein providing comprises contacting the cell with a nucleic acid, e.g., vector, encoding the expression repression system to the cell comprising the target gene.
[0344] 221. The method of any of embodiments 209-220, wherein the nucleic acid encoding the first expression repressor is disposed on a first nucleic acid molecule and the nucleic acid encoding the second expression repressor is disposed on a second nucleic acid molecule.
[0345] 222. The method of any of embodiments 209-221, wherein the nucleic acid encoding the first expression repressor is disposed on the same nucleic acid molecule as the nucleic acid encoding the second expression repressor.
[0346] 223. The method of any of embodiments 209-222, wherein administering comprises contacting the cell with the first nucleic acid molecule and the second nucleic acid molecule together, e.g., simultaneously.
[0347] 224. The method of any of embodiments 209-223, wherein administering comprises contacting the cell with the first nucleic acid molecule and the second nucleic acid molecule separately, e.g., sequentially.
[0348] 225. The method of any of embodiments 209-224, wherein providing comprises contacting the cell with a vesicle comprising the expression repression system or a nucleic acid, e.g., vector, encoding the expression repression system.
[0349] 226. The method of any of embodiments 209-225, wherein providing comprises contacting the cell with a lipid nanoparticle (LNP) comprising the expression repression system or a nucleic acid, e.g., vector, encoding the expression repression system.
[0350] 227. The method of any of embodiments 209-226, wherein the expression repression system comprises a first expression repressor and a second expression repressor, and providing comprises administering the first expression repressor and, separately, administering the second expression repressor.
[0351] 228. The method of any of embodiments 209-227, wherein the expression repression system comprises a first expression repressor and a second expression repressor and providing comprises administering the first expression repressor and the second expression repressor together, e.g., simultaneously.
[0352] 229. A method of treating a condition associated with over-expression of a target gene in a subject, comprising:
   [0353] administering the expression repressor, expression repression system, nucleic acid, vector, polypeptide, lipid nanoparticle, reaction mixture, cell, or pharmaceutical composition of any of embodiments 1-204 or 206-208 to the subject,
   [0354] thereby treating a condition associated with over-expression of a target gene in a subject.
[0355] 230. A method of treating a condition associated with mis-regulation of a target gene in a subject, comprising:
   [0356] administering the expression repressor, expression repression system, nucleic acid, vector, polypeptide, lipid nanoparticle, reaction mixture, cell, or pharmaceutical composition of any of embodiments 1-204 or 206-208 to the subject,
   [0357] thereby treating a condition associated with mis-regulation of a target gene in a subject.
[0358] 231. A method of making a cell comprising an expression repression system, the method comprising:
   [0359] providing the expression repressor, expression repression system, nucleic acid, vector, polypeptide, or pharmaceutical composition of any of embodiments 1-201 or 206-208; and
   [0360] contacting the cell with the expression repressor, expression repression system, nucleic acid, vector, or pharmaceutical composition,
   [0361] thereby making a cell comprising an expression repression system.
[0362] 232. A method of making a nucleic acid encoding an expression repression system, the method comprising:
   [0363] providing a first nucleic acid encoding the first expression repressor of the expression repression system of any of embodiments 67-186, 207, or 208;
   [0364] providing a second nucleic acid encoding the second expression repressor of the expression repression system of any of embodiments 67-186, 9207, or 208;
   [0365] combining (e.g., ligating or recombining) the first nucleic acid and the second nucleic acid into a single nucleic acid molecule,
   [0366] thereby making a nucleic acid encoding an expression repression system.
[0367] 233. A cell treated or produced by the method of any of embodiments 209-228 or 230.
[0368] 234. The cell of embodiment 233, wherein the cell does not comprise the expression repression system, e.g., at least one component (e.g., all components) of the expression repression system.
[0369] 235. The cell of either of embodiments 233 or 234, wherein expression of the target gene is decreased relative to a cell not contacted, treated, or produced by the method of any of embodiments 209-228 or 230.
[0370] 236. A kit comprising a container comprising a composition comprising an expression repressor, an expression repression system, one or more nucleic acids encoding said expression repressor or an expression repression system, a vector, a lipid nanoparticle, or a pharmaceutical composition of any of embodiments 1-208 and a set of instructions comprising at least one method for modulating, e.g., decreasing the expression of a gene within a cell with said composition.

### Definitions

[0371] Anchor Sequence: The term “anchor sequence” as used herein, refers to a nucleic acid sequence recognized by a nucleating agent that binds sufficiently to form an anchor sequence-mediated conjunction, e.g., a complex. In some embodiments, an anchor sequence comprises one or more CTCF binding motifs. In some embodiments, an anchor sequence is not located within a gene coding region. In some embodiments, an anchor sequence is located within an intergenic region. In some embodiments, an anchor sequence is not located within either of an enhancer or a promoter. In some embodiments, an anchor sequence is located at least 400 bp, at least 450 bp, at least 500 bp, at least 550 bp, at least 600 bp, at least 650 bp, at least 700 bp, at least 750 bp, at least 800 bp, at least 850 bp, at least 900 bp, at least 950 bp, or at least 1 kb away from any transcription start site. In some embodiments, an anchor sequence is located within a region that is not associated with genomic imprinting, monoallelic expression, and/or monoallelic epigenetic marks. In some embodiments, the anchor sequence has one or more functions selected from binding an endogenous nucleating polypeptide (e.g., CTCF), interacting with a second anchor sequence to form an anchor sequence mediated conjunction, or insulating against an enhancer that is outside the anchor sequence mediated conjunction. In some embodiments of the present disclosure, technologies are provided that may specifically target a particular anchor sequence or anchor sequences, without targeting other anchor sequences (e.g., sequences that may contain a nucleating agent (e.g., CTCF) binding motif in a different context); such targeted anchor sequences may be referred to as the “target anchor sequence”. In some embodiments, sequence and/or activity of a target anchor sequence is modulated while sequence and/or activity of one or more other anchor sequences that may be present in the same system (e.g., in the same cell and/or in some embodiments on the same nucleic acid molecule—e.g., the same chromosome) as the targeted anchor sequence is not modulated. In some embodiments, the anchor sequence comprises or is a nucleating polypeptide binding motif. In some embodiments, the anchor sequence is adjacent to a nucleating polypeptide binding motif.

[0372] Anchor Sequence-Mediated Conjunction: The term “anchor sequence-mediated conjunction” as used herein, refers to a DNA structure, in some cases, a complex, that occurs and/or is maintained via physical interaction or binding of at least two anchor sequences in the DNA by one or more polypeptides, such as nucleating polypeptides, or one or more proteins and/or a nucleic acid entity (such as RNA or DNA), that bind the anchor sequences to enable spatial proximity and functional linkage between the anchor sequences (see, e.g. FIG. 1).

[0373] Associated with: Two events or entities are “associated” with one another, as that term is used herein, if presence, level, form and/or function of one is correlated with that of the other. For example, in some embodiments, a particular entity (e.g., polypeptide, genetic signature, metabolite, microbe, etc.) is considered to be associated with a particular disease, disorder, or condition, if its presence, level, form and/or function correlates with incidence of and/or susceptibility to the disease, disorder, or condition (e.g., across a relevant population). In some embodiments, two or more entities are physically “associated” with one another if they interact, directly or indirectly, so that they are and/or remain in physical proximity with one another. In some embodiments, two or more entities that are physically associated with one another are covalently linked to one another; in some embodiments, two or more entities that are physically associated with one another are not covalently linked to one another but are non-covalently associated, for example by means of hydrogen bonds, van der Waals interaction, hydrophobic interactions, magnetism, and combinations thereof. In some embodiments, a DNA sequence is “associated with” a target genomic or transcription complex when the nucleic acid is at least partially within the target genomic or transcription complex, and expression of a gene in the DNA sequence is affected by formation or disruption of the target genomic or transcription complex.

[0374] Domain: As used herein, the term “domain” refers to a section or portion of an entity. In some embodiments, a “domain” is associated with a particular structural and/or functional feature of the entity so that, when the domain is physically separated from the rest of its parent entity, it substantially or entirely retains the particular structural and/or functional feature. Alternatively, or additionally, in some embodiments, a domain may be or include a portion of an entity that, when separated from that (parent) entity and linked with a different (recipient) entity, substantially retains and/or imparts on the recipient entity one or more structural and/or functional features that characterized it in the parent entity. In some embodiments, a domain is or comprises a section or portion of a molecule (e.g., a small molecule, carbohydrate, lipid, nucleic acid, polypeptide, etc.). In some embodiments, a domain is or comprises a section of a polypeptide. In some such embodiments, a domain is characterized by a particular structural element (e.g., a particular amino acid sequence or sequence motif, alpha-helix character, beta-sheet character, coiled-coil character, random coil character, etc.), and/or by a particular functional feature (e.g., binding activity, enzymatic activity, folding activity, signaling activity, etc.).

[0375] Expression repressor: As used herein, the term “expression repressor” refers to an agent or entity with one or more functionalities that decrease expression of a target gene in a cell and that specifically binds to a DNA sequence (e.g., a DNA sequence associated with a target gene, or a transcription control element operably linked to a target gene). An expression repressor comprises at least one DNA-targeting moiety and at least one repressor domain.

[0376] Expression repression system: As used herein, the term “expression repression system” refers to a plurality of expression repressors which decrease expression of a target gene in a cell. In some embodiments, an expression repression system comprises a first expression repressor and a second expression repressor, wherein the first expression repressor and second expression repressor (or nucleic acids encoding the first expression repressor and second expression repressor) are present together in a single composition, mixture, or pharmaceutical composition. In some embodiments, an expression repression system comprises a first expression repressor and a second expression repressor, wherein the first expression repressor and second expression repressor (or nucleic acids encoding the first expression repressor and second expression repressor) are present in separate compositions or pharmaceutical compositions. In some embodiments, the first expression repressor and the second expression repressor are present in the same cell at the same time. In some embodiments, the first expression repressor and the second expression repressor are not present in the same cell at the same time, e.g., they are present sequentially. For example, the first expression repressor may be present in a cell for a first time period, and then the second expression repressor may be present in the cell for a second time period, wherein the first and second time periods may be overlapping or non-overlapping.

[0377] Genomic complex: As used herein, the term “genomic complex” is a complex that brings together two genomic sequence elements that are spaced apart from one another on one or more chromosomes, via interactions between and among a plurality of protein and/or other components (potentially including, the genomic sequence elements). In some embodiments, the genomic sequence elements are anchor sequences to which one or more protein components of the complex binds. In some embodiments, a genomic complex may comprise an anchor sequence-mediated conjunction. In some embodiments, a genomic sequence element may be or comprise a CTCF binding motif, a promoter and/or an enhancer. In some embodiments, a genomic sequence element includes at least one or both of a promoter and/or regulatory site (e.g., an enhancer). In some embodiments, complex formation is nucleated at the genomic sequence element(s) and/or by binding of one or more of the protein component(s) to the genomic sequence element(s). As will be understood by those skilled in the art, in some embodiments, co-localization (e.g., conjunction) of the genomic sites via formation of the complex alters DNA topology at or near the genomic sequence element(s), including, in some embodiments, between them. In some embodiments, a genomic complex comprises an anchor sequence-mediated conjunction, which comprises one or more loops. In some embodiments, a genomic complex as described herein is nucleated by a nucleating polypeptide such as, for example, CTCF and/or Cohesin. In some embodiments, a genomic complex as described herein may include, for example, one or more of CTCF, Cohesin, non-coding RNA (e.g., eRNA), transcriptional machinery proteins (e.g., RNA polymerase, one or more transcription factors, for example selected from the group consisting of TFIIA, TFIIB, TFIID, TFIIE, TFIIF, TFIIH, etc.), transcriptional regulators (e.g., Mediator, P300, enhancer-binding proteins, repressor-binding proteins, histone modifiers, etc.), etc. In some embodiments, a genomic complex as described herein includes one or more polypeptide components and/or one or more nucleic acid components (e.g., one or more RNA components), which may, in some embodiments, be interacting with one another and/or with one or more genomic sequence elements (e.g., anchor sequences, promoter sequences, regulatory sequences (e.g., enhancer sequences)) so as to constrain a stretch of genomic DNA into a topological configuration (e.g., a loop) that it does not adopt when the complex is not formed.

[0378] Nucleic acid: As used herein, in its broadest sense, the term “nucleic acid” refers to any compound and/or substance that is or can be incorporated into an oligonucleotide chain. In some embodiments, a nucleic acid is a compound and/or substance that is or can be incorporated into an oligonucleotide chain via a phosphodiester linkage. As will be clear from context, in some embodiments, “nucleic acid” refers to an individual nucleic acid residue (e.g., a nucleotide and/or nucleoside); in some embodiments, “nucleic acid” refers to an oligonucleotide chain comprising individual nucleic acid residues. In some embodiments, a “nucleic acid” is or comprises RNA; in some embodiments, a “nucleic acid” is or comprises DNA. In some embodiments, a nucleic acid is, comprises, or consists of one or more natural nucleic acid residues. In some embodiments, a nucleic acid is, comprises, or consists of one or more nucleic acid analogs. In some embodiments, a nucleic acid analog differs from a nucleic acid in that it does not utilize a phosphodiester backbone. For example, in some embodiments, a nucleic acid is, comprises, or consists of one or more “peptide nucleic acids”, which are known in the art and have peptide bonds instead of phosphodiester bonds in the backbone, are considered within the scope of the present disclosure. Alternatively, or additionally, in some embodiments, a nucleic acid has one or more phosphorothioate and/or 5′-N-phosphoramidite linkages rather than phosphodiester bonds. In some embodiments, a nucleic acid is, comprises, or consists of one or more natural nucleosides (e.g., adenosine, thymidine, guanosine, cytidine, uridine, deoxyadenosine, deoxythymidine, deoxy guanosine, and deoxycytidine). In some embodiments, a nucleic acid is, comprises, or consists of one or more nucleoside analogs (e.g., 2-aminoadenosine, 2-thiothymidine, inosine, pyrrolo-pyrimidine, 3-methyl adenosine, 5-methylcytidine, C-5 propynyl-cytidine, C-5 propynyl-uridine, 2-aminoadenosine, C5-bromouridine, C5-fluorouridine, C5-iodouridine, C5-propynyl-uridine, C5-propynyl-cytidine, C5-methylcytidine, 2-aminoadenosine, 7-deazaadenosine, 7-deazaguanosine, 8-oxoadenosine, 8-oxoguanosine, 0(6)-methylguanine, 2-thiocytidine, methylated bases, intercalated bases, and combinations thereof). In some embodiments, a nucleic acid comprises one or more modified sugars (e.g., 2′-fluororibose, ribose, 2′-deoxyribose, arabinose, and hexose) as compared with those in natural nucleic acids. In some embodiments, a nucleic acid has a nucleotide sequence that encodes a functional gene product such as an RNA or protein. In some embodiments, a nucleic acid includes one or more introns. In some embodiments, nucleic acids are prepared by one or more of isolation from a natural source, enzymatic synthesis by polymerization based on a complementary template (in vivo or in vitro), reproduction in a recombinant cell or system, and chemical synthesis. In some embodiments, a nucleic acid is at least 3, 4, 5, 6, 7, 8, 9, 10, 15, 20, 25, 30, 35, 40, 45, 50, 55, 60, 65, 70, 75, 80, 85, 90, 95, 100, 110, 120, 130, 140, 150, 160, 170, 180, 190, 20, 225, 250, 275, 300, 325, 350, 375, 400, 425, 450, 475, 500, 600, 700, 800, 900, 1000, 1500, 2000, 2500, 3000, 3500, 4000, 4500, 5000 or more residues long. In some embodiments, a nucleic acid is partly or wholly single stranded; in some embodiments, a nucleic acid is partly or wholly double stranded. In some embodiments a nucleic acid has a nucleotide sequence comprising at least one element that encodes, or is the complement of a sequence that encodes, a polypeptide. In some embodiments, a nucleic acid has enzymatic activity.

[0379] Operably linked: As used herein, the phrase “operably linked” refers to a juxtaposition wherein the components described are in a relationship permitting them to function in their intended manner. A transcription control element “operably linked” to a functional element, e.g., gene, is associated in such a way that expression and/or activity of the functional element, e.g., gene, is achieved under conditions compatible with the transcription control element. In some embodiments, “operably linked” transcription control elements are contiguous (e.g., covalently linked) with coding elements, e.g., genes, of interest; in some embodiments, operably linked transcription control elements act in trans to or otherwise at a distance from the functional element, e.g., gene, of interest. In some embodiments, operably linked means two nucleic acid sequences are comprised on the same nucleic acid molecule. In a further embodiment, operably linked may further mean that the two nucleic acid sequences are proximal to one another on the same nucleic acid molecule, e.g., within 1000, 500, 100, 50, or 10 base pairs of each other or directly adjacent to each other.

[0380] Peptide, Polypeptide, Protein: As used herein, the terms “peptide,” “polypeptide,” and “protein” refer to a compound comprised of amino acid residues covalently linked by peptide bonds, or by means other than peptide bonds. A protein or peptide must contain at least two amino acids, and no limitation is placed on the maximum number of amino acids that can comprise a protein's or peptide's sequence. Polypeptides include any peptide or protein comprising two or more amino acids joined to each other by peptide bonds or by means other than peptide bonds. As used herein, the term refers to both short chains, which also commonly are referred to in the art as peptides, oligopeptides, and oligomers, for example, and to longer chains, which generally are referred to in the art as proteins, of which there are many types.

[0381] Repressor domain: As used herein, the term “repressor domain” refers to a domain with one or more functionalities that decrease expression of a target gene in a cell when appropriately localized in the nucleus of a cell. In some embodiments, a repressor domain is or comprises a polypeptide. In some embodiments, a repressor domain is or comprises a polypeptide and a nucleic acid. A functionality associated with a repressor domain may directly affect expression of a target gene, e.g., blocking recruitment of a transcription factor that would stimulate expression of the gene. A functionality associated with a repressor domain may indirectly affect expression of a target gene, e.g., introducing epigenetic modifications or recruiting other factors that introduce epigenetic modifications that induce a change in chromosomal topology that inhibits expression of a target gene.

[0382] Specific binding: As used herein, the term “specific binding” refers to an ability to discriminate between possible binding partners in the environment in which binding is to occur. In some embodiments, a binding agent that interacts with one particular target when other potential targets are present is said to “bind specifically” to the target with which it interacts. In some embodiments, specific binding is assessed by detecting or determining degree of association between the binding agent and its partner; in some embodiments, specific binding is assessed by detecting or determining degree of dissociation of a binding agent-partner complex. In some embodiments, specific binding is assessed by detecting or determining ability of the binding agent to compete with an alternative interaction between its partner and another entity. In some embodiments, specific binding is assessed by performing such detections or determinations across a range of concentrations.

[0383] Substantially: As used herein, the term “substantially” refers to the qualitative condition of exhibiting total or near-total extent or degree of a characteristic or property of interest. One of ordinary skill in the art will understand that biological and chemical phenomena rarely, if ever, go to completion and/or proceed to completeness or achieve or avoid an absolute result. The term “substantially” may therefore be used in some embodiments herein to capture potential lack of completeness inherent in many biological and chemical phenomena.

[0384] Symptoms are reduced: As used herein, the phrase “symptoms are reduced” may be used when one or more symptoms of a particular disease, disorder or condition is reduced in magnitude (e.g., intensity, severity, etc.) and/or frequency. In some embodiments, a delay in the onset of a particular symptom is considered one form of reducing the frequency of that symptom.

[0385] Target: An agent or entity is considered to “target” another agent or entity, in accordance with the present disclosure, if it binds specifically to the targeted agent or entity under conditions in which they come into contact with one another. In some embodiments, for example, an antibody (or antigen-binding fragment thereof) targets its cognate epitope or antigen. In some embodiments, a nucleic acid having a particular sequence targets a nucleic acid of substantially complementary sequence.

[0386] Target gene: As used herein, the term “target gene” means a gene that is targeted for modulation, e.g., of expression. In some embodiments, a target gene is part of a targeted genomic complex (e.g., a gene that has at least part of its genomic sequence as part of a target genomic complex, e.g. inside an anchor sequence-mediated conjunction), which genomic complex is targeted by one or more modulating agents as described herein. In some embodiments, modulation comprises inhibition of expression of the target gene. In some embodiments, a target gene is modulated by contacting the target gene or a transcription control element operably linked to the target gene with an expression repression system, e.g., expression repressor(s), described herein. In some embodiments, a target gene is aberrantly expressed (e.g., over-expressed) in a cell, e.g., a cell in a subject (e.g., patient).

[0387] DNA-targeting moiety: As used herein, in the context of expression repressors, the term “DNA-targeting moiety” means a domain that specifically binds to a DNA sequence (e.g., a DNA sequence associated with a target gene, or a transcription control element operably linked to a target gene).

[0388] Therapeutic agent: As used herein, the phrase “therapeutic agent” refers to an agent that, when administered to a subject, has a therapeutic effect and/or elicits a desired biological and/or pharmacological effect. In some embodiments, a therapeutic agent is any substance that can be used to alleviate, ameliorate, relieve, inhibit, prevent, delay onset of, reduce severity of, and/or reduce incidence of one or more symptoms or features of a disease, disorder, and/or condition. In some embodiments, a therapeutic agent comprises an expression repression system, e.g., an expression repressor, described herein. In some embodiments, a therapeutic agent comprises a nucleic acid encoding an expression repression system, e.g., an expression repressor, described herein. In some embodiments, a therapeutic agent comprises a pharmaceutical composition described herein.

[0389] Therapeutically effective amount: As used herein, the term “therapeutically effective amount” means an amount of a substance (e.g., a therapeutic agent, composition, and/or formulation) that elicits a desired biological response when administered as part of a therapeutic regimen. In some embodiments, a therapeutically effective amount of a substance is an amount that is sufficient, when administered to a subject suffering from or susceptible to a disease, disorder, and/or condition, to treat, diagnose, prevent, and/or delay the onset of the disease, disorder, and/or condition. As will be appreciated by those of ordinary skill in this art, an effective amount of a substance may vary depending on such factors as desired biological endpoint(s), substance to be delivered, target cell(s) or tissue(s), etc. For example, in some embodiments, an effective amount of compound in a formulation to treat a disease, disorder, and/or condition is an amount that alleviates, ameliorates, relieves, inhibits, prevents, delays onset of, reduces severity of and/or reduces incidence of one or more symptoms or features of the disease, disorder, and/or condition. In some embodiments, a therapeutically effective amount is administered in a single dose; in some embodiments, multiple unit doses are required to deliver a therapeutically effective amount.

### BRIEF DESCRIPTION OF THE DRAWING

[0390] The following detailed description of the embodiments of the invention will be better understood when read in conjunction with the appended drawings. For the purpose of illustrating the invention, there are shown in the drawings embodiments, which are presently exemplified. It should be understood, however, that the invention is not limited to the precise arrangement and instrumentalities of the embodiments shown in the drawings.

[0391] FIG. 1 shows a Genome Browser view showing key features of the region near the transcription start site of β2M. RNAseq (top level) shows mRNA expression from the β2M gene. A previously described positive control (Cas9 targeting, GD-21547) is shown in green. Blue guides (GD-28228 and GD-28229) were used to target Sp-dCas9-KRAB and orange guides (GD-28171, GD-28172 and GD-28173) were used to target Sa-dCas9-MQ1 to the CpG Island in the β2M promoter region (second level from the top). Guides were chosen based on hypomethylation of the promoter region (depicted in the CpG Methylation track, bottom level), where methylation runs from 0 to 1 (0 to 100%) and where higher methylation is depicted by red bars. Each bar represents a CpG site.

[0392] FIG. 2 shows a graph of percent change in β-2-microglobulin expression (mRNA) in HepG2 cells with treatment with a variety of expression repressors or controls. β2M mRNA levels shown are relative to the untreated control (gray). Points show biological replicates. Bars show the average and error bars indicate standard deviations. The guide ID number is shown on the x-axis. Samples treated with dCas9 are shown in magenta; dCas9-KRAB in green; sa-dCas9-MQ1 in light blue; a combination of dCas9-KRAB and sa-dCas9-MQ1 in dark blue. A β2M-knockout positive control with Cas9 is shown in orange.

[0393] FIG. 3 shows a graph of percent change in β-2-microglobulin mRNA with treatment with a variety of expression repressors or controls after 72 hours (left), and a graph of flow cytometry data of β-2-microglobulin protein levels with treatment with a variety of expression repressors or controls after 72 hours (right). (Left) Treatment with dCas9-KRAB (green) and Sa-dCas9-MQ1 (light blue) effectors, separately and together (dark blue) results in a decrease in β2M mRNA relative to untreated cells (grey) and cells treated with dCas9 (magenta). (Right) Flow cytometry revealed populations with decreased β2M immunofluorescence in cells treated with dCas9-KRAB and Sa-dCas9-MQ1 relative to untreated cells and cells treated with dCas9.

[0394] FIG. 4 shows a graph of the fold change in β-2-microglobulin mRNA with treatment with a variety of expression repressors or controls over a 22-day period. Over a 22-day period, non-transfected (blue line) and dCas9 transfected (red line) cells don't change β2M expression, whereas dCas9-KRAB (green line) transfected cells have β2M repressed in the initial days post-transfection, with maximum effect on day 2, but the repression is lost after day 5. SadCas9-MQ1 (purple line) transfected cells show significant repression (up to 85% by day 4) and the repression is retained and then slowly lost as seen by line remaining just under the dotted line in the figure. dCas9-KRAB+SadCas9-MQ1 combined transfection (orange line) did not give any added repression than what is already observed for SadCas9 alone (purple line).

[0395] FIG. 5 shows a graph of the fold change in P-2-microglobulin mRNA with treatment with a variety of expression repressors or controls over an 18-day period. Over an 18-day period untreated cells do not change β2M expression, whereas cells transfected with dCas9-MQ1, dCas9-DNMT3a/3L (m), dCas9-DNMT3a/3L (hs), dCas9-DNMT1 and dCas9-DNMT3B, show significant β2M repression post-transfection.

[0396] FIG. 6 shows a graph of the fold change in MYC expression in K-562 cells when treated with different expression repressors or expression repression systems that target the CTCF site located upstream of MYC gene. The data showed that, at least, cells treated with dCas9-DNMT3a/3L (h), dCas9-KRAB, FOG1-dCas9-FOG1, G9A-dCas9+EZH2-dCas9, dCas9-MQ1+EZH2-dCas9-KRAB, dCas9-LSD1+G9A-dCas9, dCas9-MQ1+dCas9-HDAC8, and dCas9-MQ1+G9A-dCas9-KRAB showed repression of MYC expression at 48 hour and/or 72-hour time point.

[0397] FIG. 7 shows a graph of the fold change in β2M expression in K-562 cells when treated with different expression repressors or expression repression systems that target a region upstream of the β2M promoter. The data showed that, at least, cells treated with dCas9-HDAC8, dCas9-LSD1, dCas9-MQ1, FOG1-dCas9-FOG1, G9A-dCas9-KRAB, dCas9-DNMT3a/3L (h), G9A-dCas9, EZH2-dCas9-KRAB, dCas9-KRAB, EZH2-dCas9-KRAB+dCas9-HDAC8, dCas9-LSD1+EZH2-dCas9-KRAB, dCas9-LSD1+dCas9-HDAC8, dCas9-KRAB+FOG1-dCas9-FOG1, dCas9-MQ1+G9A-dCas9-KRAB, G9A-dCas9+EZH2-dCas9, dCas9-MQ1+EZH2-dCas9-KRAB, and dCas9-MQ1+dCas9-HDAC8 showed repression of β2M expression at 48 hour, 72 hour and/or 144 hour time point.

[0398] FIG. 8 shows a graph of the fold change in HSPA1B expression in K-562 cells when treated with different expression repressors or expression repression systems that target a region downstream of the HSPA1B promoter. The data showed that, at least, cells treated with dCas9-HDAC8, EZH2-dCas9, dCas9-MQ1, dCas9-DNMT1, dCas9-DNMT3a/3L (h), dCas9-DNMT3a/3L (m), G9A-dCas9-KRAB, FOG1-dCas9-FOG1, G9A-dCas9, dCas9-KRAB, G9A-dCas9+dCas9-HDAC8, dCas9-LSD1+G9A-dCas9-KRAB, dCas9-LSD1+EZH2-dCas9, G9A-dCas9+EZH2-dCas9, dCas9-LSD1+EZH2-dCas9-KRAB, EZH2-dCas9+dCas9-HDAC8, dCas9-LSD1+dCas9-HDAC8, dCas9-MQ1+EZH2-dCas9-KRAB, dCas9-MQ1+dCas9-HDAC8, G9A-dCas9-KRAB+EZH2-dCas9-KRAB, dCas9-LSD1+G9A-dCas9 and dCas9-MQ1+G9A-dCas9-KRAB showed repression of HSPA1B expression at 48 hour, 72 hour and/or 144 hour time point.

[0399] FIG. 9 shows a graph of the fold change in GATA1 expression in K-562 cells when treated with different expression repressors or expression repression systems. The data showed that, at least, cells treated with dCas9-HDAC8, dCas9-LSD1+dCas9-HDAC8, dCas9-MQ1+dCas9-HDAC8, and G9A-dCas9+dCas9-HDAC8 showed repression of GATA1 expression at 48-hour, 72 hour and/or 144 hour time point.

### DETAILED DESCRIPTION OF CERTAIN EMBODIMENTS

[0400] The present disclosure provides technologies for modulating, e.g., decreasing, expression of a target gene in cell, e.g., in a subject or patient, through the use of an expression repressor or an expression repression system. In some embodiments, an expression repressor comprises a DNA binding moiety and at least one repressor domain. In some embodiments, an expression repressor comprises two repressor domains. In some embodiments an expression repressor comprises two identical repressor domains. In some embodiments an expression repressor comprises two non-identical repressor domains.

[0401] In some embodiments, an expression repression system comprises two or more expression repressors, each comprising a DNA-targeting moiety and at least one repressor domain. In some embodiments, the DNA-targeting moieties target two or more different DNA sequences (e.g., each expression repressor may target a different DNA sequence). Without wishing to be bound by theory, the use of an expression repression system comprising expression repressors targeting two or more different DNA sequences may be advantageous over similar systems targeting a single DNA sequence because individual expression repressors will not compete with one another or compete less with one another for binding to their target DNA sequences, thereby achieving superior localization of the various functionalities of the repressor domains. In some embodiments, it can be advantageous to use two different DNA-targeting moieties to precisely target two different repressors to two different defined locations, e.g., a first expression repressor to a first location upstream of the transcription start site and a second expression repressor to a second location comprising the transcription start site. In some embodiments, the expression repressors comprise two or more different repressor domains (e.g., each expression repressor comprises a different repressor domain from each other expression repressor). Without wishing to be bound by theory, the use of an expression repression system comprising expression repressors comprising two or more repressor domains may be advantageous over similar systems comprising a single repressor domain due to synergistic effects on expression of a target gene associated with the concerted action of the two or more repressor domains.

### Expression Repressors

[0402] Expression repressors of the present disclosure may comprise a DNA-targeting moiety and at least one repressor domain. In some embodiments, an expression repressor may comprise 1, 2, 3, 4, 5, 6, or more repressor domains. In some embodiments, an expression repressor targets two or more different DNA sequences (e.g., a 1^{st} and 2^{nd}, 3^{rd}, 4^{th}, 5^{th}, 6^{th}, 7^{th}, 8^{th}, 9^{th}, 10^{th}, 11h, 12^{th}, and/or further DNA sequence, and optionally no more than a 20^{th}, 19^{th}, 18^{th}, 17^{th}, 16^{th}, 15^{th}, 14^{th}, 13^{th}, 12^{th}, 11h, 10^{th}, 9^{th}, 8^{th}, 6^{th}, 5^{th}, 4^{th}, 3^{rd}, or 2^{nd} DNA sequence). In some embodiments, an expression repressor comprises a DNA-targeting moiety and a plurality of repressor domains (e.g., 1, 2, 3, 4, 5, 6, 7, 8, 9, 10, 11, 12, 13, 14, 15, 16, 17, 18, 19, 20, or more repressor domains (and optionally, less than 20, 19, 18, 17, 16, 15, 14, 13, 12, 11, 10, 9, 8, 7, 6, 5, 4, 3, or 2 repressor domains)) each of which may be the same or different from another of the more than one repressor domains.

[0403] In some embodiments, an expression repressor comprises a first repressor domain and a second repressor domain, wherein the first repressor domain is not identical to the second repressor domain. In some embodiments, an expression repressor comprises a first repressor domain and a second repressor domain, wherein the first repressor domain is identical to the second repressor domain. In some embodiments, the DNA-targeting moiety is situated between the first repressor domain and the second repressor domain.

[0404] An expression repressor may comprise a plurality of repressor domains, where each repressor domain comprises a different functionality than the other repressor domains. For example, an expression repressor may comprise two repressor domains, where the first repressor domain comprises DNA methylase functionality and the second repressor domain comprises a transcriptional repressor functionality. In some embodiments, an expression repressor comprises repressor domains whose functionalities are complementary to one another with regard to decreasing expression of a target gene, where the functionalities together enable inhibition of expression and, optionally, do not inhibit or negligibly inhibit expression when present individually. In some embodiments, an expression repressor comprises a plurality of repressor domains, wherein each repressor domain complements other repressor domains, each repressor domain decreases expression of a target gene.

[0405] In some embodiments, an expression repressor comprises a combination of repressor domains whose functionalities synergize with one another with regard to decreasing expression of a target gene. Without wishing to be bound by theory, in some embodiments, epigenetic modifications to a genomic locus are cumulative, in that multiple transcription activating epigenetic markers (e.g., multiple different types of epigenetic markers and/or more extensive marking of a given type) individually together inhibit expression more effectively than individual modifications alone (e.g., producing a greater decrease in expression and/or a longer-lasting decrease in expression). In some embodiments, an expression repressor comprises a plurality of repressor domains, wherein each repressor domain synergizes with other repressor domains, e.g., each repressor domain decreases expression of a target gene. In some embodiments, an expression repressor (comprising a plurality of repressor domains which synergize with one another) is more effective at inhibiting expression of a target gene than an expression repressor comprising an individual repressor domain. In some embodiments, an expression repressor comprising said plurality of repressor domains is at least 1.05× (i.e., 1.05 times), 1.1×, 1.15×, 1.2×, 1.25×, 1.3×, 1.35×, 1.4×, 1.45×, 1.5×, 1.55×, 1.6×, 1.65×, 1.7×, 1.75×, 1.8×, 1.85×, 1.9×, 1.95×, 2×, 3×, 4×, 5×, 6×, 7×, 8×, 9×, 10×, 20×, 30×, 40×, 50×, 60×, 70×, 80×, 90×, or 100× as effective at decreasing expression of a target gene than an expression repressor comprising an individual repressor domain.

[0406] In some embodiments, an expression repressor comprises a DNA-targeting moiety and a repressor domain that are covalently linked, e.g., by a peptide bond. In some embodiments, the DNA-targeting moiety and the repressor domain are situated on the same polypeptide chain, e.g., connected by one or more peptide bonds and/or a linker. In some embodiments, the expression repressor is or comprises a fusion molecule, e.g., comprising the DNA-targeting moiety and the repressor domain linked by a peptide bond and/or a linker. In some embodiments, an expression repressor comprises a targeting moiety and a plurality of effector moieties, wherein the targeting moiety and the plurality of effector moieties are covalently linked, e.g., by peptide bonds (e.g., the targeting moiety and plurality of effector moieties are all connected by a series of covalent bonds, although each individual moiety may not share a covalent bond with every other effector moiety). In some embodiments, the expression repressor comprises a DNA-targeting moiety that is linked to the N-terminal of a repressor domain on the same polypeptide chain. In some embodiments, the expression repressor comprises a DNA-targeting moiety that is linked to the C-terminal of a repressor domain on the same polypeptide chain. In some embodiments, the expression repressor comprises a DNA-targeting moiety that is linked to the C-terminal of a first repressor domain and is linked to the N-terminal of a second repressor domain on the same polypeptide chain. In some embodiments, the expression repressor comprises a DNA-targeting moiety that is disposed N-terminal of a repressor domain on the same polypeptide chain. In some embodiments, the expression repressor comprises a DNA-targeting moiety that is disposed C-terminal of a repressor domain on the same polypeptide chain. In some embodiments, an expression repressor comprises a DNA-targeting moiety and a repressor domain that are covalently linked by a non-peptide bond. In some embodiments, a DNA-targeting moiety is conjugated to a repressor domain by a non-peptide bond. In some embodiments, an expression repressor comprises a DNA-targeting moiety and a plurality of repressor domains, wherein the DNA-targeting moiety and the plurality of repressor domains are covalently linked, e.g., by peptide bonds (e.g., the DNA-targeting moiety and plurality of repressor domains are all connected by a series of covalent bonds, although each individual domain or moiety may not share a covalent bond with every other domain or moiety).

[0407] In other embodiments, an expression repressor comprises a DNA-targeting moiety and a repressor domain that are not covalently linked, e.g., that are non-covalently associated with one another. In some embodiments, an expression repressor comprises a DNA-targeting moiety that non-covalently binds to a repressor domain or vice versa. In some embodiments, an expression repressor comprises a DNA-targeting moiety and a plurality of repressor domains, wherein the DNA-targeting moiety and at least one repressor domain are not covalently linked, e.g., are non-covalently associated with one another, and wherein the DNA-targeting moiety and at least one other repressor domain are covalently linked, e.g., by a peptide bond.

[0408] In general, an expression repressor as described herein binds (e.g., via a DNA-targeting moiety) a genomic sequence element proximal to and/or operably linked to a target gene. In some embodiments, binding of the expression repressor to the genomic sequence element modulates (e.g., decreases) expression of the target gene. For example, binding of an expression repressor comprising a repressor domain that recruits or inhibits recruitment of components of the transcription machinery to the genomic sequence element may modulate (e.g., decrease) expression of the target gene. As a further example, binding of an expression repressor comprising a repressor domain with an enzymatic activity (e.g., an epigenetic modifying moiety) may modulate (e.g., decrease) expression of the target gene) through the localized enzymatic activity of the repressor domain. As a further example, both binding of an expression repressor to a genomic sequence element and the localized enzymatic activity of an expression repressor may contribute to the resulting modulation (e.g., decrease) in expression of the target gene.

[0409] In some embodiments, an expression repressor comprises a repressor domain wherein the repressor domain comprises a protein chosen from SETDB1, SETDB2, EHMT2 (i.e., G9A), EHMT1 (i.e., GLP), SUV39H1, EZH2, EZH1, SUV39H2, SETD8, SUV420H1, SUV420H2, KDM1A (i.e., LSD1), KDM1B (i.e., LSD2), KDM2A, KDM2B, KDM5A, KDM5B, KDM5C, KDM5D, KDM4B, N066, HDAC1, HDAC2, HDAC3, HDAC4, HDAC5, HDAC6, HDAC7, HDAC8, HDAC9, HDAC10, HDAC11, SIRT1, SIRT2, SIRT3, SIRT4, SIRT5, SIRT6, SIRT7, SIRT8, SIRT9, MQ1, DNMT1, DNMT3A1, DNMT3A2, DNMT3B1, DNMT3B2, DNMT3B3, DNMT3B4, DNMT3B5, DNMT3B6, DNMT3L, DNMT3a/3L, KRAB, MeCP2, HP1, RBBP4, REST, FOG1, SUZ12, or a functional variant or fragment thereof, and the second repressor domain comprises a different protein chosen from SETDB1, SETDB2, EHMT2 (i.e., G9A), EHMT1 (i.e., GLP), SUV39H1, EZH2, EZH1, SUV39H2, SETD8, SUV420H1, SUV420H2, KDM1A (i.e., LSD1), KDM1B (i.e., LSD2), KDM2A, KDM2B, KDM5A, KDM5B, KDM5C, KDM5D, KDM4B, N066, HDAC1, HDAC2, HDAC3, HDAC4, HDAC5, HDAC6, HDAC7, HDAC8, HDAC9, HDAC10, HDAC11, SIRT1, SIRT2, SIRT3, SIRT4, SIRT5, SIRT6, SIRT7, SIRT8, SIRT9, MQ1, DNMT1, DNMT3A1, DNMT3A2, DNMT3B1, DNMT3B2, DNMT3B3, DNMT3B4, DNMT3B5, DNMT3B6, DNMT3L, DNMT3a/3L, KRAB, MeCP2, HP1, RBBP4, REST, FOG1, SUZ12, or a functional variant or fragment thereof.

[0410] In some embodiments, an expression repressor comprises a first repressor domain wherein the repressor domain comprises a protein chosen from SETDB1, SETDB2, EHMT2 (i.e., G9A), EHMT1 (i.e., GLP), SUV39H1, EZH2, EZH1, SUV39H2, SETD8, SUV420H1, SUV420H2, KDM1A (i.e., LSD1), KDM1B (i.e., LSD2), KDM2A, KDM2B, KDM5A, KDM5B, KDM5C, KDM5D, KDM4B, N066, HDAC1, HDAC2, HDAC3, HDAC4, HDAC5, HDAC6, HDAC7, HDAC8, HDAC9, HDAC10, HDAC11, SIRT1, SIRT2, SIRT3, SIRT4, SIRT5, SIRT6, SIRT7, SIRT8, SIRT9, MQ1, DNMT1, DNMT3A1, DNMT3A2, DNMT3B1, DNMT3B2, DNMT3B3, DNMT3B4, DNMT3B5, DNMT3B6, DNMT3L, DNMT3a/3L, KRAB, MeCP2, HP1, RBBP4, REST, FOG1, SUZ12, or a functional variant or fragment thereof, and the second repressor domain comprises a different protein chosen from SETDB1, SETDB2, EHMT2 (i.e., G9A), EHMT1 (i.e., GLP), SUV39H1, EZH2, EZH1, SUV39H2, SETD8, SUV420H1, SUV420H2, KDM1A (i.e., LSD1), KDM1B (i.e., LSD2), KDM2A, KDM2B, KDM5A, KDM5B, KDM5C, KDM5D, KDM4B, N066, HDAC1, HDAC2, HDAC3, HDAC4, HDAC5, HDAC6, HDAC7, HDAC8, HDAC9, HDAC10, HDAC11, SIRT1, SIRT2, SIRT3, SIRT4, SIRT5, SIRT6, SIRT7, SIRT8, SIRT9, MQ1, DNMT1, DNMT3A1, DNMT3A2, DNMT3B1, DNMT3B2, DNMT3B3, DNMT3B4, DNMT3B5, DNMT3B6, DNMT3L, DNMT3a/3L, KRAB, MeCP2, HP1, RBBP4, REST, FOG1, SUZ12, or a functional variant or fragment thereof and a second repressor domain wherein the repressor domain comprises a protein chosen from SETDB1, SETDB2, EHMT2 (i.e., G9A), EHMT1 (i.e., GLP), SUV39H1, EZH2, EZH1, SUV39H2, SETD8, SUV420H1, SUV420H2, KDM1A (i.e., LSD1), KDM1B (i.e., LSD2), KDM2A, KDM2B, KDM5A, KDM5B, KDM5C, KDM5D, KDM4B, N066, HDAC1, HDAC2, HDAC3, HDAC4, HDAC5, HDAC6, HDAC7, HDAC8, HDAC9, HDAC10, HDAC11, SIRT1, SIRT2, SIRT3, SIRT4, SIRT5, SIRT6, SIRT7, SIRT8, SIRT9, MQ1, DNMT1, DNMT3A1, DNMT3A2, DNMT3B1, DNMT3B2, DNMT3B3, DNMT3B4, DNMT3B5, DNMT3B6, DNMT3L, DNMT3a/3L, KRAB, MeCP2, HP1, RBBP4, REST, FOG1, SUZ12, or a functional variant or fragment thereof, and the second repressor domain comprises a different protein chosen from SETDB1, SETDB2, EHMT2 (i.e., G9A), EHMT1 (i.e., GLP), SUV39H1, EZH2, EZH1, SUV39H2, SETD8, SUV420H1, SUV420H2, KDM1A (i.e., LSD1), KDM1B (i.e., LSD2), KDM2A, KDM2B, KDM5A, KDM5B, KDM5C, KDM5D, KDM4B, N066, HDAC1, HDAC2, HDAC3, HDAC4, HDAC5, HDAC6, HDAC7, HDAC8, HDAC9, HDAC10, HDAC11, SIRT1, SIRT2, SIRT3, SIRT4, SIRT5, SIRT6, SIRT7, SIRT8, SIRT9, MQ1, DNMT1, DNMT3A1, DNMT3A2, DNMT3B1, DNMT3B2, DNMT3B3, DNMT3B4, DNMT3B5, DNMT3B6, DNMT3L, DNMT3a/3L, KRAB, MeCP2, HP1, RBBP4, REST, FOG1, SUZ12, or a functional variant or fragment thereof.

[0411] In some embodiments, an expression repressor comprises a DNA-targeting moiety and a repressor domain wherein the C-terminal end of the repressor domain, e.g., a repressor domain chosen from EZH1, EZH2, G9A, SUV39H1, FOG1, SETDB1, or SETDB2, and the N-terminal end of the DNA-targeting moiety are covalently linked. In some embodiments, an expression repressor comprises a DNA-targeting moiety and a repressor domain wherein the N-terminal end of the repressor domain, e.g., a repressor domain chosen from LSD1, HDAC8, MQ1, DNMT1, DNMT3a/3L, FOG1, or KRAB, and the C-terminal end of the DNA-targeting moiety are covalently linked. In some embodiments, an expression repressor comprises a DNA-targeting moiety, a first repressor domain and second repressor domain, wherein, the C-terminal end of the first repressor domain, e.g., a repressor domain chosen from EZH1, EZH2, G9A, SUV39H1, FOG1, SETDB1, or SETDB2, and the N-terminal end of the DNA-targeting moiety are covalently linked and the C-terminal end of the DNA-targeting moiety and the N-terminal end of the second repressor domain, e.g., a repressor domain chosen from LSD1, HDAC8, MQ1, DNMT1, DNMT3a/3L, FOG1, or KRAB are covalently linked.

[0412] In some embodiments, an expression repressor as disclosed herein is present in a composition, pharmaceutical composition, or mixture.

[0413] While several of the embodiments herein describe systems comprising a plurality of expression repressors, it is understood that the present application also provides the expression repressors individually, e.g., for use as a single agent, or for use in a combination with a generic second therapy that need not be specified herein.

[0414] In some embodiments, an expression repressor described herein is part of an expression repression system, e.g., as described below.

### Expression Repression Systems

[0415] Expression repression systems of the present disclosure may comprise two or more expression repressors. In some embodiments, an expression repression system comprises 2, 3, 4, 5, 6, 7, 8, 9, 10, 11, 12, or more expression repressors (and optionally no more than 15, 14, 13, 12, 11, 10, 9, 8, 7, 6, 5, 4, 3, or 2). In some embodiments, an expression repression system targets two or more different DNA sequences (e.g., a 1^{st} and 2^{nd}, 3^{rd}, 4^{th}, 5^{th}, 6^{th}, 7^{th}, 8^{th}, 9^{th}, 10^{th}, 11h, 12^{th}, and/or further DNA sequence, and optionally no more than a 20^{th}, 19^{th}, 18^{th}, 17^{th}, 16^{th}, 15^{th}, 14^{th}, 13^{th}, 12^{th}, 11h, 10^{th}, 9^{th}, 8^{th}, 6^{th}, 5^{th}, 4^{th}, 3^{rd}, or 2^{nd} DNA sequence). In some embodiments, an expression repression system comprises a plurality of expression repressors, wherein each member of the plurality of expression repressors does not detectably bind, e.g., does not bind, to another member of the plurality of expression repressors. In some embodiments, an expression repression system comprises a first expression repressor and a second expression repressor, wherein the first expression repressor does not detectably bind, e.g., does not bind, to the second expression repressor.

[0416] In some embodiments, an expression repression system of the present disclosure comprises two or more expression repressors, wherein the expression repressors are present together in a composition, pharmaceutical composition, or mixture. In some embodiments, an expression repression system of the present disclosure comprises two or more expression repressors, wherein one or more expression repressors is not admixed with at least one other expression repressor. For example, an expression repression system may comprise a first expression repressor and a second expression repressor, wherein the presence of the first expression repressor in the nucleus of a cell does not overlap with the presence of the second expression repressor in the nucleus of the same cell, wherein the expression repression system achieves a decrease in expression of a target gene via the non-overlapping presences of the first and second expression repressors.

[0417] In some embodiments, the expression repressors of an expression repression system each comprise a different DNA-targeting moiety (e.g., the first, second, third, or further expression repressors each comprise different DNA-targeting moieties from one another). For example, an expression repression system may comprise a first expression repressor and a second expression repressor wherein the first expression repressor comprises a first DNA-targeting moiety (e.g., a Cas9 molecule, TAL effector molecule, or Zn Finger domain), and the second expression repressor comprises a second DNA-targeting moiety (e.g., a Cas9 molecule, TAL effector molecule, or Zn Finger domain) different from the first DNA-targeting moiety. In some embodiments, different can mean comprising distinct types of DNA-targeting moiety, e.g., the first DNA-targeting moiety comprises a Cas9 molecule, and the second DNA-targeting moiety comprises a TAL effector molecule. In other embodiments, different can mean comprising distinct variants of the same type of DNA-targeting moiety, e.g., the first DNA-targeting moiety comprises a first Cas9 molecule (e.g., from a first species) and the second DNA-targeting moiety comprises a second Cas9 molecule (e.g., from a second species). In an embodiment, when an expression repression system comprises two or more DNA-targeting moieties of the same type, e.g., two or more Cas9 molecules, the DNA-targeting moieties specifically bind two or more different DNA sequences. For example, in an expression repression system comprising two or more Cas9 molecules, the two or more Cas9 molecules may be chosen or altered such that they only appreciably bind the gRNA corresponding to their target DNA sequence (e.g., and do not appreciably bind the gRNA corresponding to the target of another Cas9 molecule). In a further example, in an expression repression system comprising two or more TAL effector molecules, the two or more TAL effector molecules may be chosen or altered such that they only appreciably bind to their target DNA sequence (e.g., and do not appreciably bind the target DNA sequence of another TAL effector molecule).

[0418] In some embodiments, an expression repression system comprises three or more expression repressors and two or more expression repressors comprise the same DNA-targeting moiety. For example, an expression repression system may comprise three expression repressors, wherein the first and second expression repressors both comprise a first DNA-targeting moiety and the third expression repressor comprises a second different DNA-targeting moiety. For a further example, an expression repression system may comprise four expression repressors, wherein the first and second expression repressors both comprise a first DNA-targeting moiety and the third and fourth expression repressors comprises a second different DNA-targeting moiety. For a further example, an expression repression system may comprise five expression repressors, wherein the first and second expression repressors both comprise a first DNA-targeting moiety, the third and fourth expression repressors both comprise a second different DNA-targeting moiety, and the fifth expression repressor comprises a third different DNA-targeting moiety. As described above, different can mean comprising different types of DNA-targeting moieties or comprising distinct variants of the same type of DNA-targeting moiety.

[0419] In some embodiments, the expression repressors of an expression repression system each bind to a different DNA sequence (e.g., the first, second, third, or further expression repressors each bind DNA sequences that are different from one another). For example, an expression repression system may comprise a first expression repressor and a second expression repressor wherein the first expression repressor binds to a first DNA sequence, and the second expression repressor binds to a second DNA sequence. In some embodiments, different can mean that: there is at least one position that is not identical between the DNA sequence bound by one expression repressor and the DNA sequence bound by another expression repressor, or that there is at least one position present in the DNA sequence bound by one expression repressor that is not present in the DNA sequence bound by another expression repressor. For example, a first expression repressor may bind to a first exemplary DNA sequence 5′-ATGATTGGATTTA-3′ (SEQ ID NO: 97), and a second expression repressor may bind to a second exemplary DNA sequence 5′-TGATTGGATTTAG-3′ (SEQ ID NO: 98); in said example, the first and second exemplary DNA sequences are different. For a further example, a first expression repressor may bind to a first exemplary DNA sequence 5′-ATGATTgGATTTA-3′ (SEQ ID NO: 99), and a second expression repressor may bind to a second exemplary DNA sequence 5′-ATGATTcGATTTA-3′ (SEQ ID NO: 100); in said example, the first and second exemplary DNA sequences are different. In some embodiments, the first DNA sequence may be situated on a first genomic DNA strand and the second DNA sequence may be situated on a second genomic DNA strand. In some embodiments, the first DNA sequence may be situated on the same genomic DNA strand as the second DNA sequence.

[0420] In some embodiments, an expression repression system comprises three or more expression repressors and two or more expression repressors bind the same DNA sequence. For example, an expression repression system may comprise three expression repressors, wherein the first and second expression repressors both bind a first DNA sequence, and the third expression repressor binds a second different DNA sequence. For a further example, an expression repression system may comprise four expression repressors, wherein the first and second expression repressors both bind a first DNA sequence and the third and fourth expression repressors both bind a second DNA sequence. For a further example, an expression repression system may comprise five expression repressors, wherein the first and second expression repressors both bind a first DNA sequence, the third and fourth expression repressors both bind a second DNA sequence, and the fifth expression repressor binds a third DNA sequence. As described above, different can mean that there is at least one position that is not identical between the DNA sequence bound by one expression repressor and the DNA sequence bound by another expression repressor, or that there is at least one position present in the DNA sequence bound by one expression repressor that is not present in the DNA sequence bound by another expression repressor.

[0421] In some embodiments, an expression repression system comprises two or more (e.g., two) expression repressors and a plurality (e.g., two) of the expression repressors comprise DNA-targeting moieties that bind to different DNA sequences. In such embodiments, a first DNA-targeting moiety may bind to a first DNA sequence and a second DNA-targeting moiety may bind to a second DNA sequence, wherein the first and the second DNA sequences are different and do not overlap. In some such embodiments, the first DNA sequence is separated from the second DNA sequence by at least 1, 2, 3, 4, 5, 6, 7, 8, 9, 10, 11, 12, 13, 14, 15, 16, 17, 18, 19, 20, 25, 30, 35, 40, 45, 50, 55, 60, 65, 70, 75, 80, 85, 90, 95, or 100 base pairs (and optionally, no more than 500, 400, 300, 200, 100, 95, 90, 85, 80, 75, 70, 65, 60, 55, or 50 base pairs). In some such embodiments, the first DNA sequence is separated from the second DNA sequence by no more than 1, 2, 3, 4, 5, 6, 7, 8, 9, 10, 11, 12, 13, 14, 15, 16, 17, 18, 19, 20, 25, 30, 35, 40, 45, 50, 55, 60, 65, 70, 75, 80, 85, 90, 95, or 100 base pairs (and optionally, no base pairs, e.g., the first and second sequence are directly adjacent one another).

[0422] In some embodiments, the expression repressors of an expression repression system each comprise a different repressor domain (e.g., the first, second, third, or further expression repressors each comprise a different repressor domain from one another). For example, an expression repression system may comprise a first expression repressor and a second expression repressor wherein the first expression repressor comprises a first repressor domain (e.g., comprising a histone methyltransferase or functional fragment thereof), and the second expression repressor comprises a second repressor domain (e.g., comprising a DNA methyltransferase or functional fragment thereof) different from the first repressor domain. In some embodiments, different can mean comprising distinct types of repressor domain, e.g., the first repressor domain comprises a histone methyltransferase and the second repressor domain comprises a DNA methyltransferase, or the first repressor domain comprises a histone methyltransferase and the second repressor domain comprises a small molecule inhibitor of an enzyme. In other embodiments, different can mean comprising distinct variants of the same type of repressor domain, e.g., the first repressor domain comprises a first histone methyltransferase (e.g., having a first site specificity or amino acid sequence) and the second repressor domain comprises a second histone methyltransferase (e.g., having a second site specificity or amino acid sequence).

[0423] In some embodiments, an expression repression system comprises a first expression repressor comprising a first repressor domain and a second expression repressor comprising a second repressor domain, wherein the first repressor domain comprises a protein chosen from SETDB1, SETDB2, EHMT2 (i.e., G9A), EHMT1 (i.e., GLP), SUV39H1, EZH2, EZH1, SUV39H2, SETD8, SUV420H1, SUV420H2, KDM1A (i.e., LSD1), KDM1B (i.e., LSD2), KDM2A, KDM2B, KDM5A, KDM5B, KDM5C, KDM5D, KDM4B, N066, HDAC1, HDAC2, HDAC3, HDAC4, HDAC5, HDAC6, HDAC7, HDAC8, HDAC9, HDAC10, HDAC11, SIRT1, SIRT2, SIRT3, SIRT4, SIRT5, SIRT6, SIRT7, SIRT8, SIRT9, MQ1, DNMT1, DNMT3A1, DNMT3A2, DNMT3B1, DNMT3B2, DNMT3B3, DNMT3B4, DNMT3B5, DNMT3B6, DNMT3L, DNMT3a/3L, KRAB, MeCP2, HP1, RBBP4, REST, FOG1, SUZ12, or a functional variant or fragment thereof, and the second repressor domain comprises a different protein chosen from SETDB1, SETDB2, EHMT2 (i.e., G9A), EHMT1 (i.e., GLP), SUV39H1, EZH2, EZH1, SUV39H2, SETD8, SUV420H1, SUV420H2, KDM1A (i.e., LSD1), KDM1B (i.e., LSD2), KDM2A, KDM2B, KDM5A, KDM5B, KDM5C, KDM5D, KDM4B, N066, HDAC1, HDAC2, HDAC3, HDAC4, HDAC5, HDAC6, HDAC7, HDAC8, HDAC9, HDAC10, HDAC11, SIRT1, SIRT2, SIRT3, SIRT4, SIRT5, SIRT6, SIRT7, SIRT8, SIRT9, MQ1, DNMT1, DNMT3A1, DNMT3A2, DNMT3B1, DNMT3B2, DNMT3B3, DNMT3B4, DNMT3B5, DNMT3B6, DNMT3L, DNMT3a/3L, KRAB, MeCP2, HP1, RBBP4, REST, FOG1, SUZ12, or a functional variant or fragment thereof.

[0424] In some embodiments, an expression repression system comprises a first expression repressor comprising a first repressor domain and a second expression repressor comprising a second repressor domain, wherein the first repressor domain comprises a protein chosen from SETDB1, SETDB2, EHMT2 (i.e., G9A), EHMT1 (i.e., GLP), SUV39H1, EZH2, EZH1, SUV39H2, SETD8, SUV420H1, SUV420H2, KDM1A (i.e., LSD1), KDM1B (i.e., LSD2), KDM2A, KDM2B, KDM5A, KDM5B, KDM5C, KDM5D, KDM4B, N066, HDAC1, HDAC2, HDAC3, HDAC4, HDAC5, HDAC6, HDAC7, HDAC8, HDAC9, HDAC10, HDAC11, SIRT1, SIRT2, SIRT3, SIRT4, SIRT5, SIRT6, SIRT7, SIRT8, SIRT9, MQ1, DNMT1, DNMT3A1, DNMT3A2, DNMT3B1, DNMT3B2, DNMT3B3, DNMT3B4, DNMT3B5, DNMT3B6, DNMT3L, DNMT3a/3L, KRAB, MeCP2, HP1, RBBP4, REST, FOG1, SUZ12, or a functional variant or fragment thereof, the second repressor domain comprises a different protein chosen from SETDB1, SETDB2, EHMT2 (i.e., G9A), EHMT1 (i.e., GLP), SUV39H1, EZH2, EZH1, SUV39H2, SETD8, SUV420H1, SUV420H2, KDM1A (i.e., LSD1), KDM1B (i.e., LSD2), KDM2A, KDM2B, KDM5A, KDM5B, KDM5C, KDM5D, KDM4B, N066, HDAC1, HDAC2, HDAC3, HDAC4, HDAC5, HDAC6, HDAC7, HDAC8, HDAC9, HDAC10, HDAC11, SIRT1, SIRT2, SIRT3, SIRT4, SIRT5, SIRT6, SIRT7, SIRT8, SIRT9, MQ1, DNMT1, DNMT3A1, DNMT3A2, DNMT3B1, DNMT3B2, DNMT3B3, DNMT3B4, DNMT3B5, DNMT3B6, DNMT3L, DNMT3a/3L, KRAB, MeCP2, HP1, RBBP4, REST, FOG1, SUZ12, or a functional variant or fragment thereof, and the third repressor domain comprises a different protein chosen from SETDB1, SETDB2, EHMT2 (i.e., G9A), EHMT1 (i.e., GLP), SUV39H1, EZH2, EZH1, SUV39H2, SETD8, SUV420H1, SUV420H2, KDM1A (i.e., LSD1), KDM1B (i.e., LSD2), KDM2A, KDM2B, KDM5A, KDM5B, KDM5C, KDM5D, KDM4B, N066, HDAC1, HDAC2, HDAC3, HDAC4, HDAC5, HDAC6, HDAC7, HDAC8, HDAC9, HDAC10, HDAC11, SIRT1, SIRT2, SIRT3, SIRT4, SIRT5, SIRT6, SIRT7, SIRT8, SIRT9, MQ1, DNMT1, DNMT3A1, DNMT3A2, DNMT3B1, DNMT3B2, DNMT3B3, DNMT3B4, DNMT3B5, DNMT3B6, DNMT3L, DNMT3a/3L, KRAB, MeCP2, HP1, RBBP4, REST, FOG1, SUZ12, or a functional variant or fragment thereof.

[0425] In some embodiments, an expression repression system comprises: (i) a first expression repressor comprising a first repressor domain and a third repressor domain, and (ii) a second expression repressor comprising a second repressor domain and optionally a fourth repressor domain, wherein the first repressor domain comprises a protein chosen from SETDB1, SETDB2, EHMT2 (i.e., G9A), EHMT1 (i.e., GLP), SUV39H1, EZH2, EZH1, SUV39H2, SETD8, SUV420H1, SUV420H2, KDM1A (i.e., LSD1), KDM1B (i.e., LSD2), KDM2A, KDM2B, KDM5A, KDM5B, KDM5C, KDM5D, KDM4B, N066, HDAC1, HDAC2, HDAC3, HDAC4, HDAC5, HDAC6, HDAC7, HDAC8, HDAC9, HDAC10, HDAC11, SIRT1, SIRT2, SIRT3, SIRT4, SIRT5, SIRT6, SIRT7, SIRT8, SIRT9, MQ1, DNMT1, DNMT3A1, DNMT3A2, DNMT3B1, DNMT3B2, DNMT3B3, DNMT3B4, DNMT3B5, DNMT3B6, DNMT3L, DNMT3a/3L, KRAB, MeCP2, HP1, RBBP4, REST, FOG1, SUZ12, or a functional variant or fragment thereof, the second repressor domain comprises a different protein chosen from SETDB1, SETDB2, EHMT2 (i.e., G9A), EHMT1 (i.e., GLP), SUV39H1, EZH2, EZH1, SUV39H2, SETD8, SUV420H1, SUV420H2, KDM1A (i.e., LSD1), KDM1B (i.e., LSD2), KDM2A, KDM2B, KDM5A, KDM5B, KDM5C, KDM5D, KDM4B, N066, HDAC1, HDAC2, HDAC3, HDAC4, HDAC5, HDAC6, HDAC7, HDAC8, HDAC9, HDAC10, HDAC11, SIRT1, SIRT2, SIRT3, SIRT4, SIRT5, SIRT6, SIRT7, SIRT8, SIRT9, MQ1, DNMT1, DNMT3A1, DNMT3A2, DNMT3B1, DNMT3B2, DNMT3B3, DNMT3B4, DNMT3B5, DNMT3B6, DNMT3L, DNMT3a/3L, KRAB, MeCP2, HP1, RBBP4, REST, FOG1, SUZ12, or a functional variant or fragment thereof, the third repressor domain comprises a different protein chosen from SETDB1, SETDB2, EHMT2 (i.e., G9A), EHMT1 (i.e., GLP), SUV39H1, EZH2, EZH1, SUV39H2, SETD8, SUV420H1, SUV420H2, KDM1A (i.e., LSD1), KDM1B (i.e., LSD2), KDM2A, KDM2B, KDM5A, KDM5B, KDM5C, KDM5D, KDM4B, N066, HDAC1, HDAC2, HDAC3, HDAC4, HDAC5, HDAC6, HDAC7, HDAC8, HDAC9, HDAC10, HDAC11, SIRT1, SIRT2, SIRT3, SIRT4, SIRT5, SIRT6, SIRT7, SIRT8, SIRT9, MQ1, DNMT1, DNMT3A1, DNMT3A2, DNMT3B1, DNMT3B2, DNMT3B3, DNMT3B4, DNMT3B5, DNMT3B6, DNMT3L, DNMT3a/3L, KRAB, MeCP2, HP1, RBBP4, REST, FOG1, SUZ12, or a functional variant or fragment thereof and the fourth repressor domain comprises a different protein chosen from SETDB1, SETDB2, EHMT2 (i.e., G9A), EHMT1 (i.e., GLP), SUV39H1, EZH2, EZH1, SUV39H2, SETD8, SUV420H1, SUV420H2, KDM1A (i.e., LSD1), KDM1B (i.e., LSD2), KDM2A, KDM2B, KDM5A, KDM5B, KDM5C, KDM5D, KDM4B, N066, HDAC1, HDAC2, HDAC3, HDAC4, HDAC5, HDAC6, HDAC7, HDAC8, HDAC9, HDAC10, HDAC11, SIRT1, SIRT2, SIRT3, SIRT4, SIRT5, SIRT6, SIRT7, SIRT8, SIRT9, MQ1, DNMT1, DNMT3A1, DNMT3A2, DNMT3B1, DNMT3B2, DNMT3B3, DNMT3B4, DNMT3B5, DNMT3B6, DNMT3L, DNMT3a/3L, KRAB, MeCP2, HP1, RBBP4, REST, FOG1, SUZ12, or a functional variant or fragment thereof.

[0426] In some embodiments, the first repressor domain comprises a histone methyltransferase activity (e.g., SETDB1, SETDB2, EHMT2 (i.e., G9A), EHMT1 (i.e., GLP), SUV39H1, EZH2, EZH1, SUV39H2, SETD8, SUV420H1, SUV420H2, or a functional variant or fragment of any thereof, e.g., a SET domain of any thereof) and the second repressor domain comprises a histone demethylase activity (e.g., KDM1A (i.e., LSD1), KDM1B (i.e., LSD2), KDM2A, KDM2B, KDM5A, KDM5B, KDM5C, KDM5D, KDM4B, N066, or a functional variant or fragment of any thereof). In some embodiments, the first repressor domain comprises a histone methyltransferase activity and the second repressor domain comprises a histone deacetylase activity (e.g., HDAC1, HDAC2, HDAC3, HDAC4, HDAC5, HDAC6, HDAC7, HDAC8, HDAC9, HDAC10, HDAC11, SIRT1, SIRT2, SIRT3, SIRT4, SIRT5, SIRT6, SIRT7, SIRT8, SIRT9, or a functional variant or fragment of any thereof). In some embodiments, the first repressor domain comprises a histone methyltransferase activity and the second repressor domain comprises a DNA methyltransferase activity (e.g., MQ1, DNMT1, DNMT3A1, DNMT3A2, DNMT3B1, DNMT3B2, DNMT3B3, DNMT3B4, DNMT3B5, DNMT3B6, DNMT3L, DNMT3a/3L, or a functional variant or fragment of any thereof). In some embodiments, the first repressor domain comprises a histone methyltransferase activity and the second repressor domain comprises a DNA demethylase activity. In some embodiments the first repressor domain comprises a histone methyltransferase activity and the second repressor domain comprises a transcription repressor activity (e.g., KRAB, MeCP2, HP1, RBBP4, REST, FOG1, SUZ12, or a functional variant or fragment of any thereof). In some embodiments, the first repressor domain comprises a histone methyltransferase activity and the second repressor domain comprises a different histone methyltransferase activity. In some embodiments, the first repressor domain comprises a histone methyltransferase activity and the second repressor domain comprises the same histone methyltransferase activity. In some embodiments, the first repressor domain comprises a histone demethylase activity and the second repressor domain comprises a histone deacetylase activity. In some embodiments, the first repressor domain comprises a histone demethylase activity and the second repressor domain comprises a DNA methyltransferase activity. In some embodiments, the first repressor domain comprises a histone demethylase activity and the second repressor domain comprises a DNA demethylase activity. In some embodiments, the first repressor domain comprises a histone demethylase activity and the second repressor domain comprises a transcription repressor activity. In some embodiments, the first repressor domain comprises a histone demethylase activity and the second repressor domain comprises a different histone demethylase activity. In some embodiments, the first repressor domain comprises a histone demethylase activity and the second repressor domain comprises the same histone demethylase activity. In some embodiments, the first repressor domain comprises a histone deacetylase activity and the second repressor domain comprises a DNA methyltransferase activity. In some embodiments, the first repressor domain comprises a histone deacetylase activity and the second repressor domain comprises a DNA demethylase activity. In some embodiments, the first repressor domain comprises a histone deacetylase activity and the second repressor domain comprises a transcription repressor activity. In some embodiments, the first repressor domain comprises a histone deacetylase activity and the second repressor domain comprises a different histone deacetylase activity. In some embodiments, the first repressor domain comprises a histone deacetylase activity and the second repressor domain comprises the same histone deacetylase activity. In some embodiments, the first repressor domain comprises a DNA methyltransferase activity and the second repressor domain comprises a DNA demethylase activity. In some embodiments, the first repressor domain comprises a DNA methyltransferase activity and the second repressor domain comprises a transcription repressor activity. In some embodiments, the first repressor domain comprises a DNA methyltransferase activity and the second repressor domain comprises a different DNA methyltransferase activity. In some embodiments, the first repressor domain comprises a DNA methyltransferase activity and the second repressor domain comprises the same DNA methyltransferase activity. In some embodiments, the first repressor domain comprises a DNA demethylase activity and the second repressor domain comprises a transcription repressor activity. In some embodiments, the first repressor domain comprises a DNA demethylase activity and the second repressor domain comprises a different DNA demethylase activity. In some embodiments, the first repressor domain comprises a DNA demethylase activity and the second repressor domain comprises the same DNA demethylase activity. In some embodiments, the first repressor domain comprises a transcription repressor activity and the second repressor domain comprises a different transcription repressor activity. In some embodiments, the first repressor domain comprises a transcription repressor activity and the second repressor domain comprises the same transcription repressor activity.

[0427] In some embodiments, an expression repression system comprises three or more expression repressors and two or more expression repressors comprise the same DNA-targeting moiety. For example, an expression repression system may comprise three expression repressors, wherein the first and second expression repressors both comprise a first repressor domain and the third expression repressor comprises a second different repressor domain. For a further example, an expression repression system may comprise four expression repressors, wherein the first and second expression repressors both comprise a first repressor domain and the third and fourth expression repressors comprises a second different repressor domain. For a further example, an expression repression system may comprise five expression repressors, wherein the first and second expression repressors both comprise a first repressor domain, the third and fourth expression repressors both comprise a second different repressor domain, and the fifth expression repressor comprises a third different repressor domain. As described above, different can mean comprising different types of repressor domain or comprising distinct variants of the same type of repressor domain.

[0428] In some embodiments, two repressor domains comprise a histone methyltransferase activity (e.g., SETDB1, SETDB2, EHMT2 (i.e., G9A), EHMT1 (i.e., GLP), SUV39H1, EZH2, EZH1, SUV39H2, SETD8, SUV420H1, SUV420H2, or a functional variant or fragment of any thereof, e.g., a SET domain of any thereof) and the other repressor domain comprises a histone demethylase activity (e.g., KDM1A (i.e., LSD1), KDM1B (i.e., LSD2), KDM2A, KDM2B, KDM5A, KDM5B, KDM5C, KDM5D, KDM4B, N066, or a functional variant or fragment of any thereof). In some embodiments, two repressor domains comprise a histone methyltransferase activity and the other repressor domain comprises a histone deacetylase activity (e.g., HDAC1, HDAC2, HDAC3, HDAC4, HDAC5, HDAC6, HDAC7, HDAC8, HDAC9, HDAC10, HDAC11, SIRT1, SIRT2, SIRT3, SIRT4, SIRT5, SIRT6, SIRT7, SIRT8, SIRT9, or a functional variant or fragment of any thereof). In some embodiments, two repressor domains comprise a histone methyltransferase activity and the other repressor domain comprises a DNA methyltransferase activity (e.g., MQ1, DNMT1, DNMT3A1, DNMT3A2, DNMT3B1, DNMT3B2, DNMT3B3, DNMT3B4, DNMT3B5, DNMT3B6, DNMT3L, DNMT3a/3L, or a functional variant or fragment of any thereof). In some embodiments, two repressor domains comprise a histone methyltransferase activity and the other repressor domain comprises a DNA demethylase activity. In some embodiments, two repressor domains comprise a histone methyltransferase activity and the other repressor domain comprises a transcription repressor activity (e.g., KRAB, MeCP2, HP1, RBBP4, REST, FOG1, SUZ12, or a functional variant or fragment of any thereof). In some embodiments, two repressor domains comprise a histone methyltransferase activity and the other repressor domain comprises a different histone methyltransferase activity. In some embodiments, two repressor domains comprise a histone methyltransferase activity and the other repressor domain comprises the same histone methyltransferase activity. In some embodiments, two repressor domains comprise a histone demethylase activity and the other repressor domain comprises a histone deacetylase activity. In some embodiments, two repressor domains comprise a histone demethylase activity and the other repressor domain comprises a DNA methyltransferase activity. In some embodiments, two repressor domains comprise a histone demethylase activity and the other repressor domain comprises a DNA demethylase activity. In some embodiments, two repressor domains comprise a histone demethylase activity and the other repressor domain comprises a transcription repressor activity. In some embodiments, two repressor domains comprise a histone demethylase activity and the other repressor domain comprises a different histone demethylase activity. In some embodiments, two repressor domains comprise a histone demethylase activity and the other repressor domain comprises the same histone demethylase activity. In some embodiments, two repressor domains comprise a histone deacetylase activity and the other repressor domain comprises a DNA methyltransferase activity. In some embodiments, two repressor domains comprise a histone deacetylase activity and the other repressor domain comprises a DNA demethylase activity. In some embodiments, two repressor domains comprise a histone deacetylase activity and the other repressor domain comprises a transcription repressor activity. In some embodiments, two repressor domains comprise a histone deacetylase activity and the other repressor domain comprises a different histone deacetylase activity. In some embodiments, two repressor domains comprise a histone deacetylase activity and the other repressor domain comprises the same histone deacetylase activity. In some embodiments, two repressor domains comprise a DNA methyltransferase activity and the other repressor domain comprises a DNA demethylase activity. In some embodiments, two repressor domains comprise a DNA methyltransferase activity and the other repressor domain comprises a transcription repressor activity. In some embodiments, two repressor domains comprise a DNA methyltransferase activity and the other repressor domain comprises a different DNA methyltransferase activity. In some embodiments, two repressor domains comprise a DNA methyltransferase activity and the other repressor domain comprises the same DNA methyltransferase activity. In some embodiments, two repressor domains comprise a DNA demethylase activity and the other repressor domain comprises a transcription repressor activity. In some embodiments, two repressor domains comprise a DNA demethylase activity and the other repressor domain comprises a different DNA demethylase activity. In some embodiments, two repressor domains comprise a DNA demethylase activity and the other repressor domain comprises the same DNA demethylase activity. In some embodiments, two repressor domains comprise a transcription repressor activity and the other repressor domain comprises a different transcription repressor activity. In some embodiments, two repressor domains comprise a transcription repressor activity and the other repressor domain comprises the same transcription repressor activity.

[0429] In some embodiments, two or more (e.g., all) expression repressors of an expression repression system are not covalently associated with each other, e.g., each expression repressor is not covalently associated with any other expression repressor. In another embodiment, two or more expression repressors of an expression repression system are covalently associated with one another. In an embodiment, an expression repression system comprises a first expression repressor and a second expression repressor disposed on the same polypeptide, e.g., as a fusion molecule, e.g., connected by a peptide bond and optionally a linker. In an embodiment, an expression repression system comprises a first expression repressor and a second expression repressor that are connected by a non-peptide bond, e.g., are conjugated to one another.

### Linkers

[0430] An expression repressor or an expression repression system as disclosed herein may comprise one or more linkers. A linker may connect a DNA-targeting moiety to a repressor domain, a repressor domain to another repressor domain, or a DNA-targeting moiety to another DNA-targeting moiety. A linker may be a chemical bond, e.g., one or more covalent bonds or non-covalent bonds. In some embodiments, a linker is covalent. In some embodiments, a linker is non-covalent. In some embodiments, a linker is a peptide linker. Such a linker may be between 2-30, 5-30, 10-30, 15-30, 20-30, 25-30, 2-25, 5-25, 10-25, 15-25, 20-25, 2-20, 5-20, 10-20, 15-20, 2-15, 5-15, 10-15, 2-10, 5-10, or 2-5 amino acids in length, or greater than or equal to 2, 5, 10, 15, 20, 25, or 30 amino acids in length (and optionally up to 50, 40, 30, 25, 20, 15, 10, or 5 amino acids in length). In some embodiments, a linker can be used to space a first domain or moiety from a second domain or moiety, e.g., a DNA-targeting moiety from a repressor domain. In some embodiments, for example, a linker can be positioned between a DNA-targeting moiety and a repressor domain, e.g., to provide molecular flexibility of secondary and tertiary structures. A linker may comprise flexible, rigid, and/or cleavable linkers described herein. In some embodiments, a linker includes at least one glycine, alanine, and serine amino acids to provide for flexibility. In some embodiments, a linker is a hydrophobic linker, such as including a negatively charged sulfonate group, polyethylene glycol (PEG) group, or pyrophosphate diester group. In some embodiments, a linker is cleavable to selectively release a moiety (e.g., polypeptide) from a modulating agent, but sufficiently stable to prevent premature cleavage.

[0431] In some embodiments, one or more moieties and/or domains of an expression repressor described herein are linked with one or more linkers. In some embodiments, an expression repression may comprise a linker situated between the DNA-targeting moiety and the repressor domain. In some embodiments, an expression repressor may comprise a first linker situated between the DNA-targeting moiety and the first repressor domain, and a second linker situated between the DNA-targeting moiety and the second repressor domain. In some embodiments, the first and the second linker may be identical. In some embodiments, the first and the second linker may be different.

[0432] As will be known by one of skill in the art, commonly used flexible linkers have sequences consisting primarily of stretches of Gly and Ser residues (“GS” linker). Flexible linkers may be useful for joining domains/moieties that require a certain degree of movement or interaction and may include small, non-polar (e.g., Gly) or polar (e.g., Ser or Thr) amino acids. Incorporation of Ser or Thr can also maintain the stability of a linker in aqueous solutions by forming hydrogen bonds with water molecules, and therefore reduce unfavorable interactions between a linker and moieties/domains.

[0433] Rigid linkers are useful to keep a fixed distance between domains/moieties and to maintain their independent functions. Rigid linkers may also be useful when a spatial separation of domains is critical to preserve the stability or bioactivity of one or more components in the fusion. Rigid linkers may have an alpha helix-structure or Pro-rich sequence, (XP)ₙ, with X designating any amino acid, preferably Ala, Lys, or Glu.

[0434] Cleavable linkers may release free functional domains in vivo. In some embodiments, linkers may be cleaved under specific conditions, such as presence of reducing reagents or proteases. In vivo cleavable linkers may utilize reversible nature of a disulfide bond. One example includes a thrombin-sensitive sequence (e.g., PRS) between the two Cys residues. In vitro thrombin treatment of CPRSC results in the cleavage of a thrombin-sensitive sequence, while a reversible disulfide linkage remains intact. Such linkers are known and described, e.g., in Chen et al. 2013. Fusion Protein Linkers: Property, Design and Functionality. Adv Drug Deliv. Rev. 65(10): 1357-1369. In vivo cleavage of linkers in fusions may also be carried out by proteases that are expressed in vivo under certain conditions, in specific cells or tissues, or constrained within certain cellular compartments. Specificity of many proteases offers slower cleavage of the linker in constrained compartments.

[0435] Examples of molecules suitable for use in linkers described herein include a negatively charged sulfonate group; lipids, such as a poly (—CH₂—) hydrocarbon chains, such as polyethylene glycol (PEG) group, unsaturated variants thereof, hydroxylated variants thereof, amidated or otherwise N-containing variants thereof; noncarbon linkers; carbohydrate linkers; phosphodiester linkers, or other molecule capable of covalently linking two or more components of an expression repressor. Non-covalent linkers are also included, such as hydrophobic lipid globules to which the polypeptide is linked, for example through a hydrophobic region of a polypeptide or a hydrophobic extension of a polypeptide, such as a series of residues rich in leucine, isoleucine, valine, or perhaps also alanine, phenylalanine, or even tyrosine, methionine, glycine, or other hydrophobic residue. Components of an expression repressor may be linked using charge-based chemistry, such that a positively charged component of an expression repressor is linked to a negative charge of another component.

### Nucleic Acids

[0436] In one aspect, the disclosure provides nucleic acid sequences encoding an expression repressor, an expression repression system, a DNA-targeting moiety and/or a repressor domain as described herein. A skilled artisan is aware that the nucleic acid sequences of RNA are identical to the corresponding DNA sequences, except that typically thymine (T) is replaced by uracil (U). It will be understood that when a nucleotide sequence is represented by a DNA sequence (e.g., comprising, A, T, G, C), this disclosure also provides the corresponding RNA sequence (e.g., comprising, A, U, G, C) in which “U” replaces “T.” Conventional notation is used herein to describe polynucleotide sequences: the left-hand end of a single-stranded polynucleotide sequence is the 5′-end; the left-hand direction of a double-stranded polynucleotide sequence is referred to as the 5′-direction.

[0437] It will be appreciated by those skilled in the art that due to the degeneracy of the genetic code, a multitude of nucleotide sequences encoding an expression repressor comprising DNA-targeting moiety and/or a repressor domain as described herein may be produced, some of which have similarity, e.g., 90%, 95%, 96%, 97%, 98%, or 99% identity to the nucleic acid sequences disclosed herein. For instance, codons AGA, AGG, CGA, CGC, CGG, and CGU all encode the amino acid arginine. Thus, at every position in the nucleic acid molecules of the disclosure where an arginine is specified by a codon, the codon can be altered to any of the corresponding codons described above without altering the encoded polypeptide.

[0438] In some embodiments a nucleic acid sequence encoding an expression repressor comprising a DNA-targeting moiety and/or one or more repressor domains may be part or all of a codon-optimized coding region, optimized according to codon usage in mammals, e.g., humans. In some embodiments, a nucleic acid sequence encoding a DNA-targeting moiety and/or one or more repressor domains is codon optimized for increasing the protein expression and/or increasing the duration of protein expression. In some embodiments, a protein produced by the codon optimized nucleic acid sequence is at least 1%, at least 2%, at least 5%, at least 10%, at least 15%, at least 20%, at least 30%, at least 40%, or at least 50% higher compared to levels of the protein when encoded by a nucleic acid sequence that is not codon optimized.

[0439] In one aspect, the disclosure is directed to a polypeptide comprising one or more (e.g., one) DNA-targeting moiety and one or more repressor domain, e.g., wherein the repressor domain is or comprises MQ1, e.g., bacterial MQ1, or a functional variant or fragment thereof. In some embodiments, MQ1 is Spiroplasma monobiae MQ1, e.g., MQ1 from strain ATCC 33825 and/or corresponding to Uniprot ID P15840. In some embodiments, MQ1 repressor domain is encoded by a nucleotide sequence of SEQ ID NO: 47. In some embodiments, a nucleotide sequence described herein comprises a sequence of SEQ ID NO: 47 or a sequence with at least 80, 85, 90, 95, 99, or 100% identity thereto, or having no more than 20, 19, 18, 17, 16, 15, 14, 13, 12, 11, 10, 9, 8, 7, 6, 5, 4, 3, 2, or 1 positions of difference thereto.

(SEQ ID NO: 47)
AGCAAGGTGGAGAACAAGACCAAGAAGCTGCGGGTGTTCG
AGGCCTTCGCCGGCATCGGCGCCCAGCGGAAGGCCCTGGA
GAAGGTGCGGAAGGACGAGTACGAGATCGTGGGCCTGGCC
GAGTGGTACGTGCCCGCCATCGTGATGTACCAGGCCATCC
ACAACAACTTCCACACCAAGCTGGAGTACAAGAGCGTGAG
CCGGGAGGAGATGATCGACTACCTGGAGAACAAGACCCTG
AGCTGGAACAGCAAGAACCCCGTGAGCAACGGCTACTGGA
AGCGGAAGAAGGACGACGAGCTGAAGATCATCTACAACGC
CATCAAGCTGAGCGAGAAGGAGGGCAACATCTTCGACATC
CGGGACCTGTACAAGCGGACCCTGAAGAACATCGACCTGC
TGACCTACAGCTTCCCCTGCCAGGACCTGAGCCAGCAGGG
CATCCAGAAGGGCATGAAGCGGGGCAGCGGCACCCGGAGC
GGCCTGCTGTGGGAGATCGAGCGGGCCCTGGACAGCACCG
AGAAGAACGACCTGCCCAAGTACCTGCTGATGGAGAACGT
GGGCGCCCTGCTGCACAAGAAGAACGAGGAGGAGCTGAAC
CAGTGGAAGCAGAAGCTGGAGAGCCTGGGCTACCAGAACA
GCATCGAGGTGCTGAACGCCGCCGACTTCGGCAGCAGCCA
GGCCCGGCGGCGGGTGTTCATGATCAGCACCCTGAACGAG
TTCGTGGAGCTGCCCAAGGGCGACAAGAAGCCCAAGAGCA
TCAAGAAGGTGCTGAACAAGATCGTGAGCGAGAAGGACAT
CCTGAACAACCTGCTGAAGTACAACCTGACCGAGTTCAAG
AAAACCAAGAGCAACATCAACAAGGCCAGCCTGATCGGCT
ACAGCAAGTTCAACAGCGAGGGCTACGTGTACGACCCCGA
GTTCACCGGCCCCACCCTGACCGCCAGCGGCGCCAACAGC
CGGATCAAGATCAAGGACGGCAGCAACATCCGGAAGATGA
ACAGCGACGAGACCTTCCTGTACATCGGCTTCGACAGCCA
GGACGGCAAGCGGGTGAACGAGATCGAGTTCCTGACCGAG
AACCAGAAGATCTTCGTGTGCGGCAACAGCATCAGCGTGG
AGGTGCTGGAGGCCATCATCGACAAGATCGGCGGC

[0440] In some embodiments, MQ1 comprises an amino acid sequence of SEQ ID NO: 90. In some embodiments, MQ1 comprises an amino acid sequence of SEQ ID NO: 57. In some embodiments, an effector domain described herein comprises SEQ ID NO: 90 or 57, or a sequence with at least 80, 85, 90, 95, 99, or 100% identity thereto, or having no more than 20, 19, 18, 17, 16, 15, 14, 13, 12, 11, 10, 9, 8, 7, 6, 5, 4, 3, 2, or 1 positions of difference thereto.

(SEQ ID NO: 90)
MSKVENKTKKLRVFEAFAGIGAQRKALEKVRKDEYEIVGL
AEWYVPAIVMYQAIHNNFHTKLEYKSVSREEMIDYLENKT
LSWNSKNPVSNGYWKRKKDDELKIIYNAIKLSEKEGNIFD
IRDLYKRTLKNIDLLTYSFPCQDLSQQGIQKGMKRGSGTR
SGLLWEIERALDSTEKNDLPKYLLMENVGALLHKKNEEEL
NQWKQKLESLGYQNSIEVLNAADFGSSQARRRVFMISTLN
EFVELPKGDKKPKSIKKVLNKIVSEKDILNNLLKYNLTEF
KKTKSNINKASLIGYSKFNSEGYVYDPEFTGPTLTASGAN
SRIKIKDGSNIRKMNSDETFLYIGFDSQDGKRVNEIEFLT
ENQKIFVCGNSISVEVLEAIIDKIGG
(SEQ ID NO: 57)
SKVENKTKKLRVFEAFAGIGAQRKALEKVRKDEYEIVGLA
EWYVPAIVMYQAIHNNFHTKLEYKSVSREEMIDYLENKTL
SWNSKNPVSNGYWKRKKDDELKIIYNAIKLSEKEGNIFDI
RDLYKRTLKNIDLLTYSFPCQDLSQQGIQKGMKRGSGTRS
GLLWEIERALDSTEKNDLPKYLLMENVGALLHKKNEEELN
QWKQKLESLGYQNSIEVLNAADFGSSQARRRVFMISTLNE
FVELPKGDKKPKSIKKVLNKIVSEKDILNNLLKYNLTEFK
KTKSNINKASLIGYSKFNSEGYVYDPEFTGPTLTASGANS
RIKIKDGSNIRKMNSDETFLYIGFDSQDGKRVNEIEFLTE
NQKIFVCGNSISVEVLEAIIDKIGG

[0441] In some embodiments, MQ1 for use in a polypeptide described herein is a variant, e.g., comprising one or more mutations, relative to wildtype MQ1 (e.g., SEQ ID NO: 90 or SEQ ID NO: 57). In some embodiments, an MQ1 variant comprises one or more amino acid substitutions, deletions, or insertions relative to wildtype MQ1. In some embodiments, an MQ1 variant comprises a K297P substitution. In some embodiments, an MQ1 variant comprises a N299C substitution. In some embodiments, an MQ1 variant comprises a E301Y substitution. In some embodiments, an MQ1 variant comprises a Q147L substitution (e.g., and has reduced DNA methyltransferase activity relative to wildtype MQ1). In some embodiments, an MQ1 variant comprises K297P, N299C, and E301Y substitutions (e.g., and has reduced DNA binding affinity relative to wildtype MQ1). In some embodiments, an MQ1 variant comprises Q147L, K297P, N299C, and E301Y substitutions (e.g., and has reduced DNA methyltransferase activity and DNA binding affinity relative to wildtype MQ1). In some embodiments, the polypeptide comprises one or more linkers described herein, e.g., connecting a moiety/domain to another moiety/domain. In some embodiments, the polypeptide comprises a DNA-targeting moiety that is or comprises a CRISPR/Cas molecule, e.g., comprising a CRISPR/Cas protein, e.g., a dCas9 protein. In some embodiments, the polypeptide is a fusion protein comprising a repressor domain that is or comprises MQ1 and a DNA-targeting moiety that is or comprises a CRISPR/Cas molecule, e.g., comprising a CRISPR/Cas protein, e.g., a dCas9 protein. In some embodiments, the polypeptide comprises an additional moiety described herein. In some embodiments, the polypeptide decreases expression of a target gene (e.g., a target gene described herein). In some embodiments, the polypeptide may be used in methods of modulating, e.g., decreasing, gene expression, methods of treating a condition, or methods of epigenetically modifying a target gene or transcription control element described herein, e.g., in place of an expression repression system. In some embodiments, an expression repression system comprises two or more (e.g., two, three, or four) expression repressors, wherein the first expression repressor comprises a repressor domain comprising MQ1, e.g., bacterial MQ1, or a functional variant or fragment thereof.

[0442] In another aspect, the disclosure is directed to an expression repressor or a polypeptide comprising one or more (e.g., one) targeting moiety and one or more effector moiety, wherein the effector moiety is or comprises Krueppel-associated box (KRAB) e.g., as according to NP_056209.2 or the protein encoded by NM_015394.5 or a functional variant or fragment thereof. In some embodiments, KRAB is a synthetic KRAB construct. In some embodiments, KRAB comprises an amino acid sequence of SEQ ID NO: 61:

(SEQ ID NO: 61)
DAKSLTAWSRTLVTFKDVFVDFTREEWKLLDTAQQILYRN
VMLENYKNLVSLGYQLTKPDVILRLEKGEEPWLVEREIHQ
ETHPDSETAFEIKSSV

[0443] In some embodiments, the KRAB repressor domain is encoded by a nucleotide sequence of SEQ ID NO: 51. In some embodiments, a nucleotide sequence described herein comprises a sequence of SEQ ID NO: 51 or a sequence with at least 80, 85, 90, 95, 99, or 100% identity thereto, or having no more than 20, 19, 18, 17, 16, 15, 14, 13, 12, 11, 10, 9, 8, 7, 6, 5, 4, 3, 2, or 1 positions of difference thereto.

(SEQ ID NO: 51)
GACGCCAAGAGCCTGACCGCCTGGAGCCGGACCCTGGTGA
CCTTCAAGGACGTGTTCGTGGACTTCACCCGGGAGGAGTG
GAAGCTGCTGGACACCGCCCAGCAGATCCTGTACCGGAAC
GTGATGCTGGAGAACTACAAGAACCTGGTGAGCCTGGGCT
ACCAGCTGACCAAGCCCGACGTGATCCTGCGGCTGGAGAA
GGGCGAGGAGCCCTGGCTGGTGGAGCGGGAGATCCACCAG
GAGACCCACCCCGACAGCGAGACCGCCTTCGAGATCAAGA
GCAGCGTG

[0444] In some embodiments, KRAB for use in a polypeptide or an expression repressor described herein is a variant, e.g., comprising one or more mutations, relative to the KRAB sequence of SEQ ID NO: 61. In some embodiments, an KRAB variant comprises one or more amino acid substitutions, deletions, or insertions relative to SEQ ID NO: 61.

[0445] In some embodiments, the polypeptide or the expression repressor is a fusion protein comprising a repressor domain that is or comprises KRAB and a DNA-targeting moiety. In some embodiments, the polypeptide or the expression repressor comprises an additional moiety described herein. In some embodiments, the polypeptide or the expression repressor decreases expression of a target gene. In some embodiments, the polypeptide or the expression repressor may be used in methods of modulating, e.g., decreasing, gene expression, methods of treating a condition, or methods of epigenetically modifying a target gene, e.g., a transcription control element described herein, e.g., in place of an expression repression system. In some embodiments, an expression repression system comprises two or more (e.g., two, three, or four) expression repressors, wherein the first expression repressor comprises a repressor domain comprising the KRAB sequence of SEQ ID NO: 61, or a functional variant or fragment thereof.

[0446] In another aspect, the disclosure is directed to an expression repressor or a polypeptide comprising one or more (e.g., one) DNA-targeting moiety and one or more repressor domain, wherein the repressor domain is or comprises DNMT1, e.g., human DNMT1, or a functional variant or fragment thereof. In some embodiments, DNMT1 is human DNMT1, e.g., corresponding to Gene ID 1786, e.g., corresponding to UniPort ID P26358.2. In some embodiments, DNMT1 comprises an amino acid sequence of SEQ ID NO: 58. In some embodiments, a repressor domain described herein comprises a sequence according to SEQ ID NO: 58 or a sequence with at least 80, 85, 90, 95, 99, or 100% identity thereto, or having no more than 20, 19, 18, 17, 16, 15, 14, 13, 12, 11, 10, 9, 8, 7, 6, 5, 4, 3, 2, or 1 positions of difference thereto:

(SEQ ID NO: 58)
VDLRTLDVFSGCGGLSEGFHQAGISDTLWAIEMWDPAAQA
FRLNNPGSTVFTEDCNILLKLVMAGETTNSRGQRLPQKGD
VEMLCGGPPCQGFSGMNRFNSRTYSKFKNSLVVSFLSYCD
YYRPRFFLLENVRNFVSFKRSMVLKLTLRCLVRMGYQCTF
GVLQAGQYGVAQTRRRAIILAAAPGEKLPLFPEPLHVFAP
RACQLSVVVDDKKFVSNITRLSSGPFRTITVRDTMSDLPE
VRNGASALEISYNGEPQSWFQRQLRGAQYQPILRDHICKD
MSALVAARMRHIPLAPGSDWRDLPNIEVRLSDGTMARKLR
YTHHDRKNGRSSSGALRGVCSCVEAGKACDPAARQFNTLI
PWCLPHTGNRHNHWAGLYGRLEWDGFFSTTVTNPEPMGKQ
GRVLHPEQHRVVSVRECARSQGFPDTYRLFGNILDKHRQV
GNAVPPPLAKAIGLEIKLCMLAKARESASAKIKEEEAAKD

[0447] In some embodiments, DNMT1 is encoded by a nucleotide sequence of SEQ ID NO: 48. In some embodiments, a nucleic acid described herein comprises a sequence of SEQ ID NO: 48 or a sequence with at least 80, 85, 90, 95, 99, or 100% identity thereto, or having no more than 20, 19, 18, 17, 16, 15, 14, 13, 12, 11, 10, 9, 8, 7, 6, 5, 4, 3, 2, or 1 positions of difference thereto:

(SEQ ID NO: 48)
GTGGATCTGAGGACACTCGACGTGTTTAGCGGATGCGGCG
GACTCTCCGAAGGCTTCCACCAAGCCGGAATTTCCGACAC
ACTCTGGGCCATTGAGATGTGGGACCCCGCCGCTCAAGCC
TTCAGACTGAATAATCCCGGCTCCACCGTGTTCACCGAGG
ACTGCAACATTCTGCTGAAGCTGGTGATGGCTGGCGAAAC
CACCAACTCTAGAGGCCAGAGGCTGCCCCAGAAGGGAGAT
GTGGAAATGCTCTGTGGAGGCCCTCCTTGCCAAGGCTTCT
CCGGCATGAACAGGTTCAACTCTAGAACATACAGCAAGTT
CAAGAACTCTCTGGTCGTGAGCTTTCTGAGCTACTGCGAC
TACTATAGACCTAGGTTCTTTCTGCTGGAGAACGTGAGAA
ATTTCGTGTCCTTCAAGAGGAGCATGGTGCTGAAGCTGAC
ACTGAGGTGTCTGGTGAGGATGGGCTACCAGTGCACATTC
GGAGTGCTGCAAGCTGGCCAGTACGGCGTGGCCCAGACCA
GAAGGAGGGCCATCATTCTGGCTGCTGCCCCCGGCGAGAA
ACTCCCTCTGTTCCCCGAGCCCCTCCACGTGTTCGCCCCT
AGAGCTTGCCAGCTGAGCGTGGTGGTCGACGATAAGAAGT
TCGTGAGCAACATCACAAGGCTGTCCAGCGGACCCTTCAG
AACCATTACCGTGAGGGATACCATGTCCGACCTCCCCGAG
GTGAGGAATGGCGCCAGCGCTCTGGAGATTTCCTACAACG
GCGAACCTCAGAGCTGGTTCCAAAGGCAGCTGAGAGGCGC
TCAGTATCAGCCCATTCTGAGGGACCACATCTGCAAAGAT
ATGAGCGCTCTGGTGGCCGCTAGAATGAGACATATTCCTC
TGGCCCCCGGCAGCGACTGGAGAGATCTGCCCAATATTGA
GGTGAGACTCAGCGACGGAACAATGGCTAGAAAACTGAGG
TACACCCATCATGATAGAAAGAACGGAAGGAGCAGCAGCG
GCGCTCTGAGAGGAGTGTGTAGCTGCGTGGAAGCTGGCAA
GGCTTGCGATCCCGCCGCTAGGCAGTTCAATACCCTCATC
CCTTGGTGTCTGCCTCACACCGGCAACAGACACAATCATT
GGGCTGGACTGTATGGAAGGCTCGAATGGGACGGCTTTTT
CAGCACCACCGTGACCAATCCCGAACCTATGGGCAAGCAA
GGAAGGGTGCTCCACCCCGAGCAGCATAGAGTCGTGTCCG
TGAGAGAATGCGCTAGAAGCCAAGGCTTCCCCGACACCTA
TAGACTGTTCGGCAACATTCTGGATAAGCACAGACAAGTG
GGAAATGCTGTCCCTCCTCCTCTGGCCAAGGCTATCGGAC
TGGAGATCAAGCTGTGTATGCTCGCCAAAGCTAGGGAGAG
CGCTTCCGCCAAGATTAAGGAGGAGGAGGCCGCCAAGGAC

[0448] In some embodiments, DNMT1 for use in a polypeptide or an expression repressor described herein is a variant, e.g., comprising one or more mutations, relative to a DNMT sequence of SEQ ID NO: 58. In some embodiments, the effector domain comprises one or more amino acid substitutions, deletions, or insertions relative to wild type DNMT1. In some embodiments, the polypeptide is a fusion protein comprising a repressor domain that is or comprises DNMT1 and a targeting moiety. In some embodiments, an expression repression system comprises two or more (e.g., two, three, or four) expression repressors, wherein the first expression repressor comprises a repressor domain comprising DNMT1, or a functional variant or fragment thereof.

[0449] In another aspect, the disclosure is directed to an expression repressor or a polypeptide comprising one or more (e.g., one) DNA-targeting moiety and one or more repressor domain, wherein the repressor domain is or comprises DNMT3a/3L complex, or a functional variant or fragment thereof. In some embodiments, the DNMT3a/3L complex is a fusion construct. In some embodiments the DNMT3a/3L complex comprises DNMT3A, e.g., human DNMT3A, e.g., as according to NP_072046.2 or the protein encoded by NM_022552.4). In some embodiments the DNMT3a/3L complex comprises mouse DNMT3A, e.g., as according to NP_031898 or the protein encoded by NM_007872. In some embodiments the DNMT3a/3L complex comprises human DNMT3L (e.g., as according to NP_787063.1 or the protein encoded by NM_175867.3). In some embodiments the DNMT3a/3L complex comprises mouse DNMT3L (e.g., as according to NP_001075164 or the protein encoded by NM_001081695). In some embodiments, DNMT3a/3L comprises an amino acid sequence of SEQ ID NO:59 or 60. In some embodiments, a repressor domain described herein comprises SEQ ID NO: 59 or SEQ ID NO: 60, or a sequence with at least 80, 85, 90, 95, 99, or 100% identity thereto, or having no more than 20, 19, 18, 17, 16, 15, 14, 13, 12, 11, 10, 9, 8, 7, 6, 5, 4, 3, 2, or 1 positions of difference thereto.

(SEQ ID NO: 59)
NHDQEFDPPKVYPPVPAEKRKPIRVLSLFDGIATGLLVLKDLGIQVDRYIASEVCEDSITVGMVRH
QGKIMYVGDVRSVTQKHIQEWGPFDLVIGGSPCNDLSIVNPARKGLYEGTGRLFFEFYRLLHDA
RPKEGDDRPFFWLFENVVAMGVSDKRDISRFLESNPVMIDAKEVSAAHRARYFWGNLPGMNRP
LASTVNDKLELQECLEHGRIAKFSKVRTITTRSNSIKQGKDQHFPVFMNEKEDILWCTEMERVFG
FPVHYTDVSNMSRLARQRLLGRSWSVPVIRHLFAPLKEYFACVSSGNSNANSRGPSFSSGLVPLS
LRGSHMNPLEMFETVPVWRRQPVRVLSLFEDIKKELTSLGFLESGSDPGQLKHVVDVTDTVRKD
VEEWGPFDLVYGATPPLGHTCDRPPSWYLFQFHRLLQYARPKPGSPRPFFWMFVDNLVLNKEDL
DVASRFLEMEPVTIPDVHGGSLQNAVRVWSNIPAIRSRHWALVSEEELSLLAQNKQSSKLAAKW
PTKLVKNCFLPLREYFKYFSTELTSS
(SEQ ID NO: 60)
NHDQEFDPPKVYPPVPAEKRKPIRVLSLFDGIATGLLVLKDLGIQVDRYIASEVCEDSITVGMVRH
QGKIMYVGDVRSVTQKHIQEWGPFDLVIGGSPCNDLSIVNPARKGLYEGTGRLFFEFYRLLHDA
RPKEGDDRPFFWLFENVVAMGVSDKRDISRFLESNPVMIDAKEVSAAHRARYFWGNLPGMNRP
LASTVNDKLELQECLEHGRIAKFSKVRTITTRSNSIKQGKDQHFPVFMNEKEDILWCTEMERVFG
FPVHYTDVSNMSRLARQRLLGRSWSVPVIRHLFAPLKEYFACVSSGNSNANSRGPSFSSGLVPLS
LRGSHMGPMEIYKTVSAWKRQPVRVLSLFRNIDKVLKSLGFLESGSGSGGGTLKYVEDVTNVVR
RDVEKWGPFDLVYGSTQPLGSSCDRCPGWYMFQFHRILQYALPRQESQRPFFWIFMDNLLLTED
DQETTTRFLQTEAVTLQDVRGRDYQNAMRVWSNIPGLKSKHAPLTPKEEEYLQAQVRSRSKLD
APKVDLLVKNCLLPLREYFKYFSQNSLPL

[0450] In some embodiments, DNMT3a/3L is encoded by a nucleotide sequence of SEQ ID NO: 49 or SEQ ID NO: 50. In some embodiments, a nucleic acid described herein comprises a sequence of SEQ ID NO: 49 or 50 or a sequence with at least 80, 85, 90, 95, 99, or 100% identity thereto, or having no more than 20, 19, 18, 17, 16, 15, 14, 13, 12, 11, 10, 9, 8, 7, 6, 5, 4, 3, 2, or 1 positions of difference thereto.

(SEQ ID NO: 49)
AACCACGACCAGGAGTTCGACCCCCCCAAGGTGTACCCCCCCGTGCCCGCCGAGAAGCGGA
AGCCCATCCGGGTGCTGAGCCTGTTCGACGGCATCGCCACCGGCCTGCTGGTGCTGAAGGAC
CTGGGCATCCAGGTGGACCGGTACATCGCCAGCGAGGTGTGCGAGGACAGCATCACCGTGG
GCATGGTGCGGCACCAGGGCAAGATCATGTACGTGGGCGACGTGCGGAGCGTGACCCAGAA
GCACATCCAGGAGTGGGGCCCCTTCGACCTGGTGATCGGCGGCAGCCCCTGCAACGACCTG
AGCATCGTGAACCCCGCCCGGAAGGGCCTGTACGAGGGCACCGGCCGGCTGTTCTTCGAGTT
CTACCGGCTGCTGCACGACGCCCGGCCCAAGGAGGGCGACGACCGGCCCTTCTTCTGGCTGT
TCGAGAACGTGGTGGCCATGGGCGTGAGCGACAAGCGGGACATCAGCCGGTTCCTGGAGAG
CAACCCCGTGATGATCGACGCCAAGGAGGTGAGCGCCGCCCACCGGGCCCGGTACTTCTGG
GGCAACCTGCCCGGCATGAACCGGCCCCTGGCCAGCACCGTGAACGACAAGCTGGAGCTGC
AGGAGTGCCTGGAGCACGGCCGGATCGCCAAGTTCAGCAAGGTGCGGACCATCACCACCCG
GAGCAACAGCATCAAGCAGGGCAAGGACCAGCACTTCCCCGTGTTCATGAACGAGAAGGAG
GACATCCTGTGGTGCACCGAGATGGAGCGGGTGTTCGGCTTCCCCGTGCACTACACCGACGT
GAGCAACATGAGCCGGCTGGCCCGGCAGCGGCTGCTGGGCCGGAGCTGGAGCGTGCCCGTG
ATCCGGCACCTGTTCGCCCCCCTGAAGGAGTACTTCGCCTGCGTGAGCAGCGGCAACAGCAA
CGCCAACAGCCGGGGCCCCAGCTTCAGCAGCGGCCTGGTGCCCCTGAGCCTGCGGGGCAGC
CACATGAATCCTCTGGAGATGTTCGAGACAGTGCCCGTGTGGAGAAGGCAACCCGTGAGGG
TGCTGAGCCTCTTCGAGGACATTAAGAAGGAGCTGACCTCTCTGGGCTTTCTGGAATCCGGC
AGCGACCCCGGCCAGCTGAAACACGTGGTGGACGTGACCGACACAGTGAGGAAGGACGTGG
AAGAGTGGGGCCCCTTTGACCTCGTGTATGGAGCCACACCTCCTCTCGGCCACACATGCGAT
AGGCCTCCCAGCTGGTATCTCTTCCAGTTCCACAGACTGCTCCAGTACGCCAGACCTAAGCC
CGGCAGCCCCAGACCCTTCTTCTGGATGTTCGTGGACAATCTGGTGCTGAACAAGGAGGATC
TGGATGTGGCCAGCAGATTTCTGGAGATGGAACCCGTGACAATCCCCGACGTGCATGGCGG
CTCTCTGCAGAACGCCGTGAGAGTGTGGTCCAACATCCCCGCCATTAGAAGCAGACACTGGG
CTCTGGTGAGCGAGGAGGAACTGTCTCTGCTGGCCCAGAATAAGCAGTCCTCCAAGCTGGCC
GCCAAGTGGCCCACCAAGCTGGTGAAGAACTGCTTTCTGCCTCTGAGGGAGTATTTCAAGTA
TTTCAGCACCGAACTGACCAGCAGCCTG
(SEQ ID NO: 50)
AACCACGACCAGGAGTTCGACCCCCCCAAGGTGTACCCCCCCGTGCCCGCCGAGAAGCGGA
AGCCCATCCGGGTGCTGAGCCTGTTCGACGGCATCGCCACCGGCCTGCTGGTGCTGAAGGAC
CTGGGCATCCAGGTGGACCGGTACATCGCCAGCGAGGTGTGCGAGGACAGCATCACCGTGG
GCATGGTGCGGCACCAGGGCAAGATCATGTACGTGGGCGACGTGCGGAGCGTGACCCAGAA
GCACATCCAGGAGTGGGGCCCCTTCGACCTGGTGATCGGCGGCAGCCCCTGCAACGACCTG
AGCATCGTGAACCCCGCCCGGAAGGGCCTGTACGAGGGCACCGGCCGGCTGTTCTTCGAGTT
CTACCGGCTGCTGCACGACGCCCGGCCCAAGGAGGGCGACGACCGGCCCTTCTTCTGGCTGT
TCGAGAACGTGGTGGCCATGGGCGTGAGCGACAAGCGGGACATCAGCCGGTTCCTGGAGAG
CAACCCCGTGATGATCGACGCCAAGGAGGTGAGCGCCGCCCACCGGGCCCGGTACTTCTGG
GGCAACCTGCCCGGCATGAACCGGCCCCTGGCCAGCACCGTGAACGACAAGCTGGAGCTGC
AGGAGTGCCTGGAGCACGGCCGGATCGCCAAGTTCAGCAAGGTGCGGACCATCACCACCCG
GAGCAACAGCATCAAGCAGGGCAAGGACCAGCACTTCCCCGTGTTCATGAACGAGAAGGAG
GACATCCTGTGGTGCACCGAGATGGAGCGGGTGTTCGGCTTCCCCGTGCACTACACCGACGT
GAGCAACATGAGCCGGCTGGCCCGGCAGCGGCTGCTGGGCCGGAGCTGGAGCGTGCCCGTG
ATCCGGCACCTGTTCGCCCCCCTGAAGGAGTACTTCGCCTGCGTGAGCAGCGGCAACAGCAA
CGCCAACAGCCGGGGCCCCAGCTTCAGCAGCGGCCTGGTGCCCCTGAGCCTGCGGGGCAGC
CACATGGGCCCCATGGAGATCTACAAGACCGTGAGCGCCTGGAAGCGGCAGCCCGTGCGGG
TGCTGAGCCTGTTCCGGAACATCGACAAGGTGCTGAAATCCCTGGGCTTCCTGGAGAGCGGC
AGCGGCAGCGGCGGCGGCACCCTGAAGTACGTGGAGGACGTGACCAACGTGGTGCGGCGGG
ACGTGGAGAAGTGGGGCCCCTTCGACCTGGTGTACGGCAGCACCCAGCCCCTGGGCAGCAG
CTGCGACCGGTGCCCCGGCTGGTACATGTTCCAGTTCCACCGGATCCTGCAGTACGCCCTGC
CCCGGCAGGAGAGCCAGCGGCCCTTCTTCTGGATCTTCATGGACAACCTGCTGCTGACCGAG
GACGACCAGGAGACCACCACCCGGTTCCTGCAGACCGAGGCCGTGACCCTGCAGGACGTGC
GGGGCCGGGACTACCAGAACGCCATGCGGGTGTGGAGCAACATCCCCGGCCTGAAATCCAA
GCACGCCCCCCTGACCCCCAAGGAGGAGGAGTACCTGCAGGCCCAGGTGCGGAGCCGGAGC
AAGCTGGACGCCCCCAAGGTGGACCTGCTGGTGAAGAACTGCCTGCTGCCCCTGCGGGAGT
ACTTCAAGTACTTCAGCCAGAACAGCCTGCCCCTG

[0451] In some embodiments, DNMT3a/3L for use in a polypeptide or an expression repressor described herein is a variant, e.g., comprising one or more mutations, relative to the DNMT3a/3L of SEQ ID NO: 59 or SEQ ID NO: 60. In some embodiments, an DNMT3a/3L variant comprises one or more amino acid substitutions, deletions, or insertions relative to SEQ ID NO: 59 or SEQ ID NO: 60. In some embodiments, the polypeptide or the expression repressor is a fusion protein comprising a repressor domain that is or comprises DNMT3a/3L and a DNA-targeting moiety. In some embodiments, an expression repression system comprises two or more (e.g., two, three, or four) expression repressors, wherein the first expression repressor comprises a repressor domain comprising DNMT3a/3L, or a functional variant or fragment thereof.

[0452] In another aspect, the disclosure is directed to an expression repressor or a polypeptide comprising one or more (e.g., one) DNA-targeting moiety and one or more repressor domain, wherein the repressor domain is or comprises DNMT3b, e.g., human DNMT3b, or a functional variant or fragment thereof. In some embodiments the DNMT3b is human DNMT3b e.g., as according to NP_008823.1 or AOX21819.1, or the protein encoded by NM_006892.4 or KX447429.) In some embodiments, DNMT3b comprises an amino acid sequence of SEQ ID NO: 85. In some embodiments, a repressor domain described herein comprises SEQ ID NO: 85, or a sequence with at least 80, 85, 90, 95, 99, or 100% identity thereto, or having no more than 20, 19, 18, 17, 16, 15, 14, 13, 12, 11, 10, 9, 8, 7, 6, 5, 4, 3, 2, or 1 positions of difference thereto.

DNMT3b
(SEQ ID NO: 85)
MKGDTRHLNGEEDAGGREDSILVNGACSDQSSDSPPILEAIRTPEIRGRRSSSRLSKREVSSLLSYT
QDLTGDGDGEDGDGSDTPVMPKLFRETRTRSESPAVRTRNNNSVSSRERHRPSPRSTRGRQGRN
HVDESPVEFPATRSLRRRATASAGTPWPSPPSSYLTIDLTDDTEDTHGTPQSSSTPYARLAQDSQQ
GGMESPQVEADSGDGDSSEYQVSADKLVALGLFSQHFNLATFNKLVSYRKAMYHALEKARVR
AGKTFPSSPGDSLEDQLKPMLEWAHGGFKPTGIEGLKPNNTQPENKTRRRTADDSATSDYCPAP
KRLKTNCYNNGKDRGDEDQSREQMASDVANNKSSLEDGCLSCGRKNPVSFHPLFEGGLCQTCR
DRFLELFYMYDDDGYQSYCTVCCEGRELLLCSNTSCCRCFCVECLEVLVGTGTAAEAKLQEPWS
CYMCLPQRCHGVLRRRKDWNVRLQAFFTSDTGLEYEAPKLYPAIPAARRRPIRVLSLFDGIATGY
LVLKELGIKVGKYVASEVCEESIAVGTVKHEGNIKYVNDVRNITKKNIEEWGPFDLVIGGSPCND
LSNVNPARKGLYEGTGRLFFEFYHLLNYSRPKEGDDRPFFWMFENVVAMKVGDKRDISRFLECN
PVMIDAIKVSAAHRARYFWGNLPGMNRPVIASKNDKLELQDCLEYNRIAKLKKVQTITTKSNSIK
QGKNQLFPVVMNGKEDVLWCTELERIFGFPVHYTDVSNMGRGARQKLLGRSWSVPVIRHLFAP
LKDYFACE

[0453] In another aspect, the disclosure is directed to an expression repressor or a polypeptide comprising one or more (e.g., one) targeting moiety and one or more effector moiety, wherein the effector moiety is or comprises G9A e.g., as according to NP_001350618.1 or the protein encoded by NM_001363689.1 or a functional variant or fragment thereof. In some embodiments, G9A comprises an amino acid sequence of SEQ ID NO: 62:

(SEQ ID NO: 62)
GNRAIRTEKIICRDVARGYENVPIPCVNGVDGEPCPEDYKYISENCETSTMNIDRNITHLQHCTCV
DDCSSSNCLCGQLSIRCWYDKDGRLLQEFNKIEPPLIFECNQACSCWRNCKNRVVQSGIKVRLQL
YRTAKMGWGVRALQTIPQGTFICEYVGELISDAEADVREDDSYLFDLDNKDGEVYCIDARYYG
NISRFINHLCDPNIIPVRVFMLHQDLRFPRIAFFSSRDIRTGEELGFDYGDRFWDIKSKYFTCQCGS
EKCKHSAEAIALEQSRLARLD

[0454] In some embodiments, the G9A repressor domain is encoded by a nucleotide sequence of SEQ ID NO: 52. In some embodiments, a nucleotide sequence described herein comprises a sequence of SEQ ID NO: 52 or a sequence with at least 80, 85, 90, 95, 99, or 100% identity thereto, or having no more than 20, 19, 18, 17, 16, 15, 14, 13, 12, 11, 10, 9, 8, 7, 6, 5, 4, 3, 2, or 1 positions of difference thereto.

(SEQ ID NO: 52)
GGAAATAGGGCTATCAGAACCGAGAAGATCATCTGTAGGGACGTGGCTAGAGGCTACGAGA
ACGTGCCCATTCCTTGCGTGAATGGCGTGGATGGCGAACCTTGCCCCGAGGACTACAAATAC
ATCTCCGAGAACTGCGAAACCAGCACAATGAACATCGACAGAAACATCACCCACCTCCAGC
ACTGCACATGTGTGGATGACTGCTCCTCCAGCAACTGTCTGTGCGGCCAGCTCTCCATCAGA
TGCTGGTACGACAAGGACGGCAGACTGCTGCAAGAGTTCAACAAGATCGAACCCCCTCTCA
TCTTCGAGTGTAACCAAGCTTGCAGCTGCTGGAGAAACTGCAAGAATAGAGTGGTCCAGAG
CGGCATCAAGGTGAGACTGCAACTGTACAGAACCGCCAAGATGGGATGGGGAGTGAGGGCT
CTGCAAACCATTCCCCAAGGCACCTTCATCTGCGAATACGTGGGCGAACTGATCTCCGACGC
CGAAGCTGACGTGAGAGAGGACGACAGCTATCTCTTCGATCTGGACAATAAGGACGGCGAG
GTGTACTGCATCGACGCTAGATATTACGGCAACATCTCTAGATTCATCAACCACCTCTGCGA
TCCCAACATCATTCCCGTGAGGGTGTTCATGCTGCACCAAGATCTGAGGTTCCCTAGAATCG
CCTTCTTCAGCTCTAGAGACATCAGAACCGGCGAGGAGCTGGGCTTCGATTACGGCGATAGA
TTCTGGGACATCAAGTCCAAGTACTTCACATGCCAGTGCGGCAGCGAGAAGTGTAAGCACA
GCGCTGAGGCCATTGCTCTGGAGCAGTCTAGACTGGCCAGACTGGAT

[0455] In some embodiments, G9A for use in a polypeptide or an expression repressor described herein is a variant, e.g., comprising one or more mutations, relative to the G9A sequence of SEQ ID NO: 62. In some embodiments, an G9A variant comprises one or more amino acid substitutions, deletions, or insertions relative to SEQ ID NO: 62.

[0456] In some embodiments, the polypeptide or the expression repressor is a fusion protein comprising a repressor domain that is or comprises G9A and a DNA-targeting moiety. In some embodiments, the polypeptide or the expression repressor comprises an additional moiety described herein. In some embodiments, the polypeptide or the expression repressor decreases expression of a target gene. In some embodiments, the polypeptide or the expression repressor may be used in methods of modulating, e.g., decreasing, gene expression, methods of treating a condition, or methods of epigenetically modifying a target gene, e.g., a transcription control element described herein, e.g., in place of an expression repression system. In some embodiments, an expression repression system comprises two or more (e.g., two, three, or four) expression repressors, wherein the first expression repressor comprises a repressor domain comprising the G9A sequence of SEQ ID NO: 62, or a functional variant or fragment thereof. In another aspect, the disclosure is directed to an expression repressor or a polypeptide comprising one or more (e.g., one) targeting moiety and one or more effector moiety, wherein the effector moiety is or comprises HDAC8, e.g., as according to NP_001159890 or the protein encoded by NM_001166418 or a functional variant or fragment thereof. In some embodiments, HDAC8 comprises an amino acid sequence of SEQ ID NO: 63:

(SEQ ID NO: 63)
EEPEEPADSGQSLVPVYIYSPEYVSMCDSLAKIPKRASMVHSLIEAYALHKQMRIVKPKVASMEE
MATFHTDAYLQHLQKVSQEGDDDHPDSIEYGLGYDCPATEGIFDYAAAIGGATITAAQCLIDGM
CKVAINWSGGWHHAKKDEASGFCYLNDAVLGILRLRRKFERILYVDLDLHHGDGVEDAFSFTS
KVMTVSLHKFSPGFFPGTGDVSDVGLGKGRYYSVNVPIQDGIQDEKYYQICESVLKEVYQAFNP
KAVVLQLGADTIAGDPMCSFNMTPVGIGKCLKYILQWQLATLILGGGGYNLANTARCWTYLTG
VILGKTLSSEIPDHEFFTAYGPDYVLEITPSCRPDRNEPHRIQQILNYIKGNLKHVV

[0457] In some embodiments, the HDAC8 repressor domain is encoded by a nucleotide sequence of SEQ ID NO: 53. In some embodiments, a nucleotide sequence described herein comprises a sequence of SEQ ID NO: 53 or a sequence with at least 80, 85, 90, 95, 99, or 100% identity thereto, or having no more than 20, 19, 18, 17, 16, 15, 14, 13, 12, 11, 10, 9, 8, 7, 6, 5, 4, 3, 2, or 1 positions of difference thereto.

(SEQ ID NO: 53)
GAGGAGCCCGAGGAGCCCGCCGATAGCGGACAATCTCTGGTGCCCGTCTACATCTACAGCC
CCGAATATGTGAGCATGTGTGATTCCCTCGCCAAGATCCCTAAGAGAGCCAGCATGGTGCAT
TCTCTGATCGAGGCCTACGCTCTGCATAAGCAAATGAGGATCGTGAAGCCCAAGGTCGCCAG
CATGGAAGAGATGGCCACCTTTCACACCGATGCCTACCTCCAACATCTCCAGAAGGTGTCCC
AAGAGGGCGACGACGACCACCCCGACTCCATTGAGTACGGACTGGGCTATGATTGCCCCGC
CACCGAGGGCATCTTTGACTATGCCGCCGCTATCGGCGGAGCTACCATCACAGCCGCCCAGT
GTCTGATTGATGGCATGTGCAAGGTCGCCATCAACTGGTCCGGAGGCTGGCATCATGCCAAG
AAGGATGAGGCCTCCGGCTTCTGTTATCTGAATGACGCCGTGCTGGGCATTCTGAGACTGAG
GAGGAAATTCGAGAGGATTCTGTACGTGGATCTGGATCTGCATCACGGAGATGGAGTCGAA
GATGCCTTCAGCTTCACCAGCAAGGTGATGACAGTCTCTCTGCACAAGTTCTCCCCCGGCTTC
TTTCCCGGAACCGGCGACGTGTCCGACGTGGGACTGGGCAAGGGAAGGTACTACAGCGTGA
ACGTGCCCATTCAAGACGGCATCCAAGACGAGAAGTACTACCAGATCTGCGAGTCCGTGCTC
AAGGAGGTCTACCAAGCCTTCAATCCTAAGGCTGTCGTGCTCCAACTGGGAGCTGATACCAT
TGCTGGCGATCCCATGTGCAGCTTCAATATGACACCCGTCGGAATCGGCAAGTGCCTCAAGT
ACATCCTCCAGTGGCAGCTCGCCACCCTCATTCTCGGAGGAGGCGGATACAATCTGGCTAAT
ACCGCCAGATGCTGGACCTATCTGACCGGCGTGATTCTGGGCAAAACACTGAGCAGCGAAA
TCCCCGACCACGAGTTTTTCACCGCTTACGGCCCCGACTACGTGCTGGAGATCACCCCCAGC
TGCAGACCCGATAGAAACGAACCCCATAGAATCCAGCAAATTCTGAACTATATCAAGGGCA
ACCTCAAGCACGTCGTG

[0458] In some embodiments, HDAC8 for use in a polypeptide or an expression repressor described herein is a variant, e.g., comprising one or more mutations, relative to the HDAC8 sequence of SEQ ID NO: 63. In some embodiments, an HDAC8 variant comprises one or more amino acid substitutions, deletions, or insertions relative to SEQ ID NO: 63.

[0459] In some embodiments, the polypeptide or the expression repressor is a fusion protein comprising a repressor domain that is or comprises HDAC8 and a DNA-targeting moiety. In some embodiments, the polypeptide or the expression repressor comprises an additional moiety described herein. In some embodiments, the polypeptide or the expression repressor decreases expression of a target gene. In some embodiments, the polypeptide or the expression repressor may be used in methods of modulating, e.g., decreasing, gene expression, methods of treating a condition, or methods of epigenetically modifying a target gene, e.g., a transcription control element described herein, e.g., in place of an expression repression system. In some embodiments, an expression repression system comprises two or more (e.g., two, three, or four) expression repressors, wherein the first expression repressor comprises a repressor domain comprising the HDAC8 sequence of SEQ ID NO: 63, or a functional variant or fragment thereof.

[0460] In another aspect, the disclosure is directed to an expression repressor or a polypeptide comprising one or more (e.g., one) targeting moiety and one or more effector moiety, wherein the effector moiety is or comprises LSD1 e.g., as according to NP_055828.2 or the protein encoded by NM_015013.4 or a functional variant or fragment thereof. In some embodiments, KRAB comprises an amino acid sequence of SEQ ID NO: 64:

(SEQ ID NO: 64)
LSGKKAAAAAAAAAAAATGTEAGPGTAGGSENGSEVAAQPAGLSGPAEVGPGAVGERTPRKK
EPPRASPPGGLAEPPGSAGPQAGPTVVPGSATPMETGIAETPEGRRTSRRKRAKVEYREMDESLA
NLSEDEYYSEEERNAKAEKEKKLPPPPPQAPPEEENESEPEEPSGVEGAAFQSRLPHDRMTSQEA
ACFPDIISGPQQTQKVFLFIRNRTLQLWLDNPKIQLTFEATLQQLEAPYNSDTVLVHRVHSYLERH
GLINFGIYKRIKPLPTKKTGKVIIIGSGVSGLAAARQLQSFGMDVTLLEARDRVGGRVATFRKGN
YVADLGAMVVTGLGGNPMAVVSKQVNMELAKIKQKCPLYEANGQAVPKEKDEMVEQEFNRL
LEATSYLSHQLDFNVLNNKHVSLGQALEVVIQLQEKHVKDEQIEHWKKIVKTQEELKELLNKM
VNLKEKIKELHQQYKEASEVKPPRDITAEFLVKSKHRDLTALCKEYDELAETQGKLEEKLQELEA
NPPSDVYLSSRDRQILDWHFANLEFANATPLSTLSLKHWDQDDDFEFTGSHLTVRNGYSCVPVA
LAEGLDIKLNTAVRQVRYTASGCEVIAVNTRSTSQTFIYKCDAVLCTLPLGVLKQQPPAVQFVPP
LPEWKTSAVQRMGFGNLNKVVLCFDRVFWDPSVNLFGHVGSTTASRGELFLFWNLYKAPILLA
LVAGEAAGIMENISDDVIVGRCLAILKGIFGSSAVPQPKETVVSRWRADPWARGSYSYVAAGSS
GNDYDLMAQPITPGPSIPGAPQPIPRLFFAGEHTIRNYPATVHGALLSGLREAGRIADQFLGAMYT
LPRQATPGVPAQQSPSM

[0461] In some embodiments, the LSD1 repressor domain is encoded by a nucleotide sequence of SEQ ID NO: 54. In some embodiments, a nucleotide sequence described herein comprises a sequence of SEQ ID NO: 54 or a sequence with at least 80, 85, 90, 95, 99, or 100% identity thereto, or having no more than 20, 19, 18, 17, 16, 15, 14, 13, 12, 11, 10, 9, 8, 7, 6, 5, 4, 3, 2, or 1 positions of difference thereto.

(SEQ ID NO: 54)
CTCTCCGGAAAGAAAGCCGCCGCTGCCGCTGCCGCCGCTGCTGCTGCCGCTACCGGCACAGA
AGCTGGCCCCGGAACAGCTGGCGGAAGCGAAAACGGAAGCGAAGTGGCTGCCCAGCCCGCC
GGACTGTCCGGACCCGCCGAGGTGGGACCCGGCGCTGTCGGCGAAAGGACCCCCAGAAAAA
AGGAGCCTCCTAGAGCCAGCCCTCCCGGCGGACTCGCCGAACCTCCCGGCAGCGCTGGACCT
CAAGCCGGACCTACAGTGGTGCCCGGCAGCGCTACACCTATGGAGACCGGCATCGCTGAGA
CCCCCGAGGGAAGGAGAACCAGCAGAAGGAAGAGAGCCAAGGTGGAGTACAGAGAGATGG
ATGAGTCTCTGGCTAACCTCAGCGAGGACGAGTACTACTCCGAGGAGGAAAGGAATGCCAA
GGCCGAGAAGGAGAAGAAGCTGCCCCCTCCTCCCCCTCAAGCCCCCCCCGAGGAGGAGAAC
GAGTCCGAGCCCGAGGAACCCAGCGGAGTGGAAGGAGCCGCCTTTCAGTCCAGACTGCCCC
ACGACAGAATGACATCCCAAGAGGCCGCTTGCTTTCCCGACATTATTTCCGGCCCTCAGCAG
ACCCAGAAGGTGTTTCTGTTCATTAGAAATAGAACACTCCAGCTGTGGCTCGACAACCCCAA
GATCCAGCTGACCTTCGAGGCTACCCTCCAACAGCTGGAGGCCCCCTACAATAGCGATACCG
TGCTGGTGCACAGAGTGCACAGCTATCTGGAGAGGCACGGCCTCATTAACTTCGGCATTTAC
AAGCGGATCAAGCCCCTGCCCACCAAGAAAACAGGCAAGGTGATCATCATCGGCAGCGGCG
TGAGCGGCCTGGCCGCCGCCCGGCAGCTGCAGAGCTTCGGCATGGACGTGACCCTGCTGGA
GGCCCGGGACCGGGTGGGCGGCCGGGTGGCCACCTTCCGGAAGGGCAACTACGTGGCCGAC
CTGGGCGCCATGGTGGTGACCGGCCTGGGCGGCAACCCCATGGCCGTGGTGAGCAAGCAGG
TGAACATGGAGCTGGCCAAGATCAAGCAGAAGTGCCCCCTGTACGAGGCCAACGGCCAGGC
CGTGCCCAAGGAGAAGGACGAGATGGTGGAGCAGGAGTTCAACCGGCTGCTGGAGGCCACC
AGCTACCTGAGCCACCAGCTGGACTTCAACGTGCTGAACAACAAGCACGTGAGCCTGGGCC
AGGCCCTGGAGGTGGTGATCCAGCTGCAGGAGAAGCACGTGAAGGACGAGCAGATCGAGC
ACTGGAAGAAGATCGTGAAAACACAGGAGGAGCTGAAGGAGCTGCTGAACAAGATGGTGA
ACCTGAAGGAGAAGATCAAGGAGCTGCACCAGCAGTACAAGGAGGCCAGCGAGGTGAAGC
CCCCCCGGGACATCACCGCCGAGTTCCTGGTCAAAAGCAAGCACCGGGACCTGACCGCCCT
GTGCAAGGAGTACGACGAGCTGGCCGAGACCCAGGGCAAGCTGGAGGAGAAGCTGCAGGA
GCTGGAGGCCAACCCCCCCAGCGACGTGTACCTGAGCAGCCGGGACCGGCAGATCCTGGAC
TGGCACTTCGCCAACCTGGAGTTCGCCAACGCCACCCCCCTGAGCACCCTGAGCCTGAAGCA
CTGGGACCAGGACGACGACTTCGAGTTCACCGGCAGCCACCTGACCGTGCGGAACGGCTAC
AGCTGCGTGCCCGTGGCCCTGGCCGAGGGCCTGGACATCAAGCTGAACACCGCCGTGCGGC
AGGTGCGGTACACCGCCAGCGGCTGCGAGGTGATCGCCGTGAACACCCGGAGCACCAGCCA
GACCTTCATCTACAAGTGCGACGCCGTGCTGTGCACCCTGCCCCTGGGCGTGCTGAAGCAGC
AGCCCCCCGCCGTGCAGTTCGTGCCCCCCCTGCCCGAGTGGAAAACAAGCGCCGTGCAGCG
GATGGGCTTCGGCAACCTGAACAAGGTGGTGCTGTGCTTCGACCGGGTGTTCTGGGACCCCA
GCGTGAACCTGTTCGGCCACGTGGGCAGCACCACCGCCAGCCGGGGCGAGCTGTTCCTGTTC
TGGAACCTGTACAAGGCCCCCATCCTGCTGGCCCTGGTGGCCGGCGAGGCCGCCGGCATCAT
GGAGAACATCAGCGACGACGTGATCGTGGGCCGGTGCCTGGCCATCCTGAAGGGCATCTTC
GGCAGCAGCGCCGTGCCCCAGCCCAAGGAGACCGTGGTGAGCCGGTGGCGGGCCGACCCCT
GGGCCCGGGGCAGCTACAGCTACGTGGCCGCCGGCAGCAGCGGCAACGACTACGACCTGAT
GGCCCAGCCCATCACCCCCGGCCCCAGCATCCCCGGCGCCCCCCAGCCCATCCCCCGGCTGT
TCTTCGCCGGCGAGCACACCATCCGGAACTACCCCGCCACCGTGCACGGCGCCCTGCTGAGC
GGCCTGCGGGAGGCAGGACGGATCGCCGACCAGTTCCTGGGCGCCATGTACACCCTGCCCC
GGCAGGCCACCCCCGGCGTGCCCGCCCAGCAGAGCCCCAGCATG

[0462] In some embodiments, LSD1 for use in a polypeptide or an expression repressor described herein is a variant, e.g., comprising one or more mutations, relative to the LSD1 sequence of SEQ ID NO: 64. In some embodiments, an LSD1 variant comprises one or more amino acid substitutions, deletions, or insertions relative to SEQ ID NO: 64.

[0463] In some embodiments, the polypeptide or the expression repressor is a fusion protein comprising a repressor domain that is or comprises LSD1 and a DNA-targeting moiety. In some embodiments, the polypeptide or the expression repressor comprises an additional moiety described herein. In some embodiments, the polypeptide or the expression repressor decreases expression of a target gene. In some embodiments, the polypeptide or the expression repressor may be used in methods of modulating, e.g., decreasing, gene expression, methods of treating a condition, or methods of epigenetically modifying a target gene, e.g., a transcription control element described herein, e.g., in place of an expression repression system. In some embodiments, an expression repression system comprises two or more (e.g., two, three, or four) expression repressors, wherein the first expression repressor comprises a repressor domain comprising the LSD1 sequence of SEQ ID NO: 64, or a functional variant or fragment thereof.

[0464] In another aspect, the disclosure is directed to an expression repressor or a polypeptide comprising one or more (e.g., one) targeting moiety and one or more effector moiety, wherein the effector moiety is or comprises EZH2, e.g., as according to NP-004447.2 or the protein encoded by NM_004456.5 or a functional variant or fragment thereof. In some embodiments, EZH2 comprises an amino acid sequence of SEQ ID NO: 65:

(SEQ ID NO: 65)
GQTGKKSEKGPVCWRKRVKSEYMRLRQLKRFRRADEVKSMFSSNRQKILERTEILNQEWKQRRI
QPVHILTSVSSLRGTRECSVTSDLDFPTQVIPLKTLNAVASVPIMYSWSPLQQNFMVEDETVLHNI
PYMGDEVLDQDGTFIEELIKNYDGKVHGDRECGFINDEIFVELVNALGQYNDDDDDDDGDDPEE
REEKQKDLEDHRDDKESRPPRKFPSDKIFEAISSMFPDKGTAEELKEKYKELTEQQLPGALPPECT
PNIDGPNAKSVQREQSLHSFHTLFCRRCFKYDCFLHPFHATPNTYKRKNTETALDNKPCGPQCYQ
HLEGAKEFAAALTAERIKTPPKRPGGRRRGRLPNNSSRPSTPTINVLESKDTDSDREAGTETGGEN
NDKEEEEKKDETSSSSEANSRCQTPIKMKPNIEPPENVEWSGAEASMFRVLIGTYYDNFCAIARLI
GTKTCRQVYEFRVKESSIIAPAPAEDVDTPPRKKKRKHRLWAAHCRKIQLKKDGSSNHVYNYQP
CDHPRQPCDSSCPCVIAQNFCEKFCQCSSECQNRFPGCRCKAQCNTKQCPCYLAVRECDPDLCLT
CGAADHWDSKNVSCKNCSIQRGSKKHLLLAPSDVAGWGIFIKDPVQKNEFISEYCGEIISQDEAD
RRGKVYDKYMCSFLFNLNNDFVVDATRKGNKIRFANHSVNPNCYAKVMMVNGDHRIGIFAKR
AIQTGEELFFDYRYSQADALKYVGIEREMEIP

[0465] In some embodiments, the EZH2 repressor domain is encoded by a nucleotide sequence of SEQ ID NO: 55. In some embodiments, a nucleotide sequence described herein comprises a sequence of SEQ ID NO: 55 or a sequence with at least 80, 85, 90, 95, 99, or 100% identity thereto, or having no more than 20, 19, 18, 17, 16, 15, 14, 13, 12, 11, 10, 9, 8, 7, 6, 5, 4, 3, 2, or 1 positions of difference thereto.

(SEQ ID NO: 55)
GGCCAGACCGGCAAGAAGAGCGAGAAGGGCCCCGTGTGCTGGCGGAAGCGGGTGAAGAGC
GAGTACATGCGGCTGCGGCAGCTGAAGCGGTTCCGGCGGGCCGACGAGGTGAAGAGCATGT
TCAGCAGCAACCGGCAGAAGATCCTGGAGCGGACCGAGATCCTGAACCAGGAGTGGAAGCA
GCGGCGAATCCAGCCCGTGCACATCCTGACCAGCGTGAGCAGCCTGCGGGGCACCCGGGAG
TGCAGCGTGACCAGCGACCTGGACTTCCCCACCCAGGTGATCCCCCTAAAGACCCTGAACGC
CGTGGCCAGCGTGCCCATCATGTACAGCTGGAGCCCCCTGCAGCAGAACTTCATGGTGGAGG
ACGAGACCGTGCTGCACAACATCCCCTACATGGGCGACGAGGTGCTGGACCAGGACGGCAC
CTTCATCGAGGAGCTGATCAAGAACTACGACGGCAAGGTGCACGGCGACCGGGAGTGCGGC
TTCATCAACGACGAGATCTTCGTGGAGCTGGTGAACGCCCTGGGCCAGTACAACGACGACG
ACGACGACGACGACGGCGACGACCCCGAGGAGCGGGAGGAGAAGCAGAAGGACCTGGAGG
ACCACCGGGACGACAAGGAGAGCCGGCCCCCCCGGAAGTTCCCCAGCGACAAGATCTTCGA
GGCCATCAGCAGCATGTTCCCCGACAAGGGCACCGCCGAGGAGCTGAAGGAGAAGTACAAG
GAGCTGACCGAGCAGCAGCTGCCCGGCGCCCTGCCCCCCGAGTGCACCCCCAACATCGACG
GCCCCAACGCCAAGAGCGTGCAGCGGGAGCAGAGCCTGCACAGCTTCCACACCCTGTTCTG
CCGGCGGTGCTTCAAGTACGACTGCTTCCTGCACCCCTTCCACGCCACCCCCAACACCTACA
AGCGGAAGAACACCGAGACCGCCCTGGACAACAAGCCCTGCGGCCCCCAGTGCTACCAGCA
CCTGGAGGGCGCCAAGGAGTTCGCCGCCGCCCTGACCGCCGAGCGGATCAAGACCCCCCCC
AAGCGGCCCGGCGGCCGGCGGCGGGGCCGGCTGCCCAACAACAGCAGCCGGCCCAGCACCC
CCACCATCAACGTGCTGGAGAGCAAGGACACCGACAGCGACCGGGAGGCCGGCACCGAGA
CCGGCGGCGAGAACAACGACAAGGAGGAGGAGGAGAAGAAGGACGAGACCAGCAGCAGC
AGCGAGGCCAACAGCCGGTGCCAGACCCCCATCAAGATGAAGCCCAACATCGAGCCCCCCG
AGAACGTGGAGTGGAGCGGCGCCGAGGCCAGCATGTTCCGGGTGCTGATCGGCACCTACTA
CGACAACTTCTGCGCCATCGCCCGGCTGATCGGCACCAAGACCTGCCGGCAGGTGTACGAGT
TCCGGGTGAAGGAGAGCAGCATCATCGCCCCCGCCCCCGCCGAGGACGTGGACACCCCCCC
CCGGAAGAAGAAGCGGAAGCACCGGCTGTGGGCCGCCCACTGCCGGAAGATCCAGCTGAAG
AAGGACGGCAGCAGCAACCACGTGTACAACTACCAGCCCTGCGACCACCCCCGGCAGCCCT
GCGACAGCAGCTGCCCCTGCGTGATCGCCCAGAACTTCTGCGAGAAGTTCTGCCAGTGCAGC
AGCGAGTGCCAGAACCGGTTCCCCGGCTGCCGGTGCAAGGCCCAGTGCAACACCAAGCAGT
GCCCCTGCTACCTGGCCGTGCGGGAGTGCGACCCCGACCTGTGCCTGACCTGCGGCGCCGCC
GACCACTGGGACAGCAAGAACGTGAGCTGCAAGAACTGCAGCATCCAGCGGGGCAGCAAG
AAGCACCTGCTGCTGGCCCCCAGCGACGTGGCCGGCTGGGGCATCTTCATCAAGGACCCCGT
GCAGAAGAACGAGTTCATCAGCGAGTACTGCGGCGAGATCATCAGCCAGGACGAGGCCGAC
CGGCGGGGCAAGGTGTACGACAAGTACATGTGCAGCTTCCTGTTCAACCTGAACAACGACTT
CGTGGTGGACGCCACCCGGAAGGGCAACAAGATCCGGTTCGCCAACCACAGCGTGAACCCC
AACTGCTACGCCAAGGTGATGATGGTGAACGGCGACCACCGGATCGGCATCTTCGCCAAGC
GGGCCATCCAGACCGGCGAGGAGCTGTTCTTCGACTACCGGTACAGCCAGGCCGACGCCCT
GAAGTACGTGGGCATCGAGCGGGAGATGGAGATCCCC

[0466] In some embodiments, EZH2 for use in a polypeptide or an expression repressor described herein is a variant, e.g., comprising one or more mutations, relative to the EZH2 sequence of SEQ ID NO: 65. In some embodiments, an EZH2 variant comprises one or more amino acid substitutions, deletions, or insertions relative to SEQ ID NO: 65.

[0467] In some embodiments, the polypeptide or the expression repressor is a fusion protein comprising a repressor domain that is or comprises EZH2 and a DNA-targeting moiety. In some embodiments, the polypeptide or the expression repressor comprises an additional moiety described herein. In some embodiments, the polypeptide or the expression repressor decreases expression of a target gene. In some embodiments, the polypeptide or the expression repressor may be used in methods of modulating, e.g., decreasing, gene expression, methods of treating a condition, or methods of epigenetically modifying a target gene, e.g., a transcription control element described herein, e.g., in place of an expression repression system. In some embodiments, an expression repression system comprises two or more (e.g., two, three, or four) expression repressors, wherein the first expression repressor comprises a repressor domain comprising the EZH2 sequence of SEQ ID NO: 65, or a functional variant or fragment thereof.

[0468] In another aspect, the disclosure is directed to an expression repressor or a polypeptide comprising one or more (e.g., one) targeting moiety and one or more effector moiety, wherein the effector moiety is or comprises FOG1 e.g., as according to NP_722520.2 or the protein encoded by NM_153813.3 or a functional variant or fragment thereof. In some embodiments, FOG1 comprises an amino acid sequence of SEQ ID NO: 66:

(SEQ ID NO: 66)
SRRKQSNPRQIKRSLGDMEAREEVQLVGASHMEQKATAPEAPSP

[0469] In some embodiments, the FOG1 repressor domain is encoded by a nucleotide sequence of SEQ ID NO: 56. In some embodiments, a nucleotide sequence described herein comprises a sequence of SEQ ID NO: 56 or a sequence with at least 80, 85, 90, 95, 99, or 100% identity thereto, or having no more than 20, 19, 18, 17, 16, 15, 14, 13, 12, 11, 10, 9, 8, 7, 6, 5, 4, 3, 2, or 1 positions of difference thereto.

(SEQ ID NO: 56)
AGCAGAAGGAAGCAGAGCAACCCCAGACAAATCAAGAGATCTCTGGGCG
ACATGGAGGCCAGAGAGGAAGTGCAGCTGGTGGGCGCCAGCCACATGGA
GCAGAAGGCTACAGCCCCCGAGGCCCCCAGCCCC

[0470] In some embodiments, FOG1 for use in a polypeptide or an expression repressor described herein is a variant, e.g., comprising one or more mutations, relative to the FOG 1 sequence of SEQ ID NO: 66. In some embodiments, an FOG1 variant comprises one or more amino acid substitutions, deletions, or insertions relative to SEQ ID NO: 66.

[0471] In some embodiments, the polypeptide or the expression repressor is a fusion protein comprising a repressor domain that is or comprises FOG1 and a DNA-targeting moiety. In some embodiments, the polypeptide or the expression repressor comprises an additional moiety described herein. In some embodiments, the polypeptide or the expression repressor decreases expression of a target gene. In some embodiments, the polypeptide or the expression repressor may be used in methods of modulating, e.g., decreasing, gene expression, methods of treating a condition, or methods of epigenetically modifying a target gene, e.g., a transcription control element described herein, e.g., in place of an expression repression system. In some embodiments, an expression repression system comprises two or more (e.g., two, three, or four) expression repressors, wherein the first expression repressor comprises a repressor domain comprising the FOG1 sequence of SEQ ID NO: 66, or a functional variant or fragment thereof.

[0472] In some embodiments, provided technologies are described as comprising a gRNA that specifically targets a target gene. In some embodiments, the target gene is an oncogene, a tumor suppressor, or a MYC mis-regulation disorder related gene. In some embodiments, the target gene is MYC. In some embodiments, the target gene is an MHC class I molecule, e.g., β2M. In some embodiments, the target gene encodes a heat shock protein, e.g., HSPA1B. In some embodiments, the target gene is a transcription factor, e.g., GATA1.

[0473] In some embodiments, technologies provided herein include methods of delivering one or more expression repressors or expression repression systems described herein to a subject, e.g., to a nucleus of a cell or tissue of a subject, by linking such a moiety to a DNA-targeting moiety as part of a fusion molecule.

[0474] In some embodiments, an expression repressor comprises a nuclear localization sequence (NLS). In some embodiments, the expression repressor comprises an NLS, e.g., an SV40 NLS at the N-terminus. In some embodiments, the expression repressor comprises an NLS, e.g., a nucleoplasmin NLS at the C-terminus. In some embodiments, the expression repressor comprises a first NLS at the N-terminus and a second NLS at the C-terminus. In some embodiments the first and the second NLS have the same sequence. In some embodiments, the first and the second NLS have different sequences. In some embodiments, the expression repression repressor comprises an SV40 NLS, e.g., the expression repressor comprises a sequence according to PKKKRK (SEQ ID NO: 86). In some embodiments, the expression repressor comprises an epitope tag, e.g., an HA tag: YPYDVPDYA (SEQ ID NO: 80). For example, the expression repressor may comprise two copies of the epitope tag.

[0475] While an epitope tag is useful in many research contexts, it is sometimes desirable to omit an epitope tag in a therapeutic context. Accordingly, in some embodiments, the expression repressor lacks an epitope tag. In some embodiments, an expression repressor described herein comprises a sequence provided herein (or a sequence with at least 80, 85, 90, 95, 99, or 100% identity thereto, or having no more than 20, 19, 18, 17, 16, 15, 14, 13, 12, 11, 10, 9, 8, 7, 6, 5, 4, 3, 2, or 1 positions of difference thereto), but lacking the HA tag of SEQ ID NO: 80. In some embodiments, a nucleic acid described herein comprises a sequence provided herein (or a sequence with at least 80, 85, 90, 95, 99, or 100% identity thereto, or having no more than 20, 19, 18, 17, 16, 15, 14, 13, 12, 11, 10, 9, 8, 7, 6, 5, 4, 3, 2, or 1 positions of difference thereto), but lacking a region encoding the HA tag of SEQ ID NO: 80. In some embodiments, the expression repressor comprises a nucleoplasmin NLS, e.g., the expression repressor comprises a sequence of KRPAATKKAGQAKKK (SEQ ID NO: 87). In some embodiments, the expression repressor does not comprise an NLS. In some embodiments, the expression repressor does not comprise an epitope tag. In some embodiments the expression repressor does not comprise an HA tag. In some embodiments, the expression repressor does not comprise an HA tag sequence according to SEQ ID NO: 80.

### DNA-Targeting Moieties

[0476] DNA-targeting moieties may specifically bind a DNA sequence, e.g., a DNA sequence associated with a target gene, e.g., binds, a genomic sequence element (e.g., a promoter, a TSS, or an anchor sequence) in, proximal to, and/or operably linked to a target gene. Any molecule or compound that specifically binds a DNA sequence may be used as a DNA-targeting moiety.

[0477] In some embodiments, a DNA-targeting moiety targets, e.g., binds, a component of a genomic complex (e.g., ASMC). In some embodiments, a DNA-targeting moiety targets, e.g., binds, an expression control sequence (e.g., a promoter or enhancer) operably linked to a target gene. In some embodiments, a DNA-targeting moiety targets, e.g., binds, a target gene, or a part of a target gene. The target of a DNA-targeting moiety may be referred to as its targeted component. A targeted component may be any genomic sequence element operably linked to a target gene, or the target gene itself, including but not limited to a promoter, enhancer, anchor sequence, exon, intron, UTR encoding sequence, a splice site, or a transcription start site. In some embodiments, a DNA-targeting moiety binds specifically to one or more target anchor sequences (e.g., within a cell) and not to non-targeted anchor sequences (e.g., within the same cell).

[0478] In some embodiments, a DNA-targeting moiety may be or comprise a CRISPR/Cas molecule, a TAL effector molecule, a Zn finger domain, peptide nucleic acid (PNA) or a nucleic acid molecule. In some embodiments, an expression repressor comprises one DNA-targeting moiety. In some embodiments, an expression repression system comprises a plurality of expression repressors, wherein each member of the plurality of expression repressors comprises a DNA-targeting moiety, wherein each DNA-targeting moiety does not detectably bind, e.g., does not bind, to another DNA-targeting moiety. In some embodiments, an expression repression system comprises a first expression repressor comprising a first DNA-targeting moiety and a second expression repressor comprising a second DNA-targeting moiety, wherein the first DNA-targeting moiety does not detectably bind, e.g., does not bind, to the second DNA-targeting moiety. In some embodiments, an expression repression system comprises a first expression repressor comprising a first DNA-targeting moiety and a second expression repressor comprising a second DNA-targeting moiety, wherein the first DNA-targeting moiety does not detectably bind, e.g., does not bind, to another first DNA-targeting moiety, and the second DNA-targeting moiety does not detectably bind, e.g., does not bind, to another second DNA-targeting moiety. In some embodiments, a DNA-targeting moiety for use in the compositions and methods described herein is functional (e.g., binds to a DNA sequence) in a monomeric, e.g., non-dimeric, state.

[0479] In some embodiments, binding of a targeting moiety to a targeted component decreases binding affinity of the targeted component for another transcription factor, genomic complex component, or genomic sequence element. In some embodiments, a DNA-targeting moiety binds to its target sequence with a K_{D} of less than or equal to 500, 450, 400, 350, 300, 250, 200, 150, 100, 50, 40, 30, 20, 10, 9, 8, 7, 6, 5, 4, 3, 2, 1, 0.9, 0.8, 0.7, 0.6, 0.5, 0.4, 0.3, 0.2, 0.1, 0.09, 0.08, 0.07, 0.06, 0.05, 0.04, 0.03, 0.02, 0.01, 0.005, 0.002, or 0.001 nM (and optionally, a K_{D} of at least 50, 40, 30, 20, 10, 9, 8, 7, 6, 5, 4, 3, 2, 1, 0.9, 0.8, 0.7, 0.6, 0.5, 0.4, 0.3, 0.2, 0.1, 0.09, 0.08, 0.07, 0.06, 0.05, 0.04, 0.03, 0.02, 0.01, 0.005, 0.002, or 0.001 nM). In some embodiments, a DNA-targeting moiety binds to its target sequence with a K_{D} of 0.001 nM to 500 nM, e.g., 0.1 nM to 5 nM, e.g., about 0.5 nM. In some embodiments, a DNA-targeting moiety binds to a non-target sequence with a K_{D} of at least 500, 600, 700, 800, 900, 1000, 2000, 5000, 10,000, or 100,000 nM (and optionally, does not appreciably bind to a non-target sequence). In some embodiments, a DNA-targeting moiety does not bind to a non-target sequence.

[0480] In some embodiments, a DNA-targeting moiety comprises a nucleic acid sequence complementary to a targeted component, e.g., a promoter of a target gene. In some embodiments, a targeting moiety comprises a nucleic acid sequence that is at least 10%, 15%, 20%, 25%, 30%, 35%, 40%, 45%, 50%, 55%, 60%, 65%, 70%, 75%, 80%, 85%, 90%, 95%, 99%, or 100% complementary to a targeted component.

[0481] In some embodiments, the DNA-targeting moiety of an expression repressor comprises no more than 100, 90, 80, 70, 60, 50, 40, 30, or 20 nucleotides (and optionally at least 10, 20, 30, 40, 50, 60, 70, 80, or 90 nucleotides). In some embodiments, an expression repressor or a repressor domain of a fusion molecule, comprises no more than 2000, 1900, 1800, 1700, 1600, 1500, 1400, 1300, 1200, 1100, 1000, 900, 800, 700, 600, 500, 400, 300, 200, or 100 amino acids (and optionally at least 50, 100, 200, 300, 400, 500, 600, 700, 800, 900, 1000, 1100, 1200, 1300, 1400, 1500, 1600, 1700, 1800, or 1900 amino acids). In some embodiments, an expression repressor or the effector moiety of a fusion molecule, comprises 100-2000, 100-1900, 100-1800, 100-1700, 100-1600, 100-1500, 100-1400, 100-1300, 100-1200, 100-1100, 100-1000, 100-900, 100-800, 100-700, 100-600, 100-500, 100-400, 100-300, 100-200, 200-2000, 200-1900, 200-1800, 200-1700, 200-1600, 200-1500, 200-1400, 200-1300, 200-1200, 200-1100, 200-1000, 200-900, 200-800, 200-700, 200-600, 200-500, 200-400, 200-300, 300-2000, 300-1900, 300-1800, 300-1700, 300-1600, 300-1500, 300-1400, 300-1300, 300-1200, 300-1100, 300-1000, 300-900, 300-800, 300-700, 300-600, 300-500, 300-400, 400-2000, 400-1900, 400-1800, 400-1700, 400-1600, 400-1500, 400-1400, 400-1300, 400-1200, 400-1100, 400-1000, 400-900, 400-800, 400-700, 400-600, 400-500, 500-2000, 500-1900, 500-1800, 500-1700, 500-1600, 500-1500, 500-1400, 500-1300, 500-1200, 500-1100, 500-1000, 500-900, 500-800, 500-700, 500-600, 600-2000, 600-1900, 600-1800, 600-1700, 600-1600, 600-1500, 600-1400, 600-1300, 600-1200, 600-1100, 600-1000, 600-900, 600-800, 600-700, 700-2000, 700-1900, 700-1800, 700-1700, 700-1600, 700-1500, 700-1400, 700-1300, 700-1200, 700-1100, 700-1000, 700-900, 700-800, 800-2000, 800-1900, 800-1800, 800-1700, 800-1600, 800-1500, 800-1400, 800-1300, 800-1200, 800-1100, 800-1000, 800-900, 900-2000, 900-1900, 900-1800, 900-1700, 900-1600, 900-1500, 900-1400, 900-1300, 900-1200, 900-1100, 900-1000, 1000-2000, 1000-1900, 1000-1800, 1000-1700, 1000-1600, 1000-1500, 1000-1400, 1000-1300, 1000-1200, 1000-1100, 1100-2000, 1100-1900, 1100-1800, 1100-1700, 1100-1600, 1100-1500, 1100-1400, 1100-1300, 1100-1200, 1200-2000, 1200-1900, 1200-1800, 1200-1700, 1200-1600, 1200-1500, 1200-1400, 1200-1300, 1300-2000, 1300-1900, 1300-1800, 1300-1700, 1300-1600, 1300-1500, 1300-1400, 1400-2000, 1400-1900, 1400-1800, 1400-1700, 1400-1600, 1400-1500, 1500-2000, 1500-1900, 1500-1800, 1500-1700, 1500-1600, 1600-2000, 1600-1900, 1600-1800, 1600-1700, 1700-2000, 1700-1900, 1700-1800, 1800-2000, 1800-1900, or 1900-2000 amino acids.

[0482] An expression repressor or an expression repression system as disclosed herein, may comprise nucleic acid, e.g., one or more nucleic acids. In some embodiments, a nucleic acid is or comprises RNA; in some embodiments, a nucleic acid is or comprises DNA. In some embodiments, a nucleic acid is or comprises more than 50% ribonucleotides. In some embodiments, a nucleic acid is, comprises, or consists of one or more natural nucleic acid residues. In some embodiments, a nucleic acid is, comprises, or consists of one or more nucleic acid analogs. In some embodiments, a nucleic acid analog differs from a nucleic acid in that it does not utilize a phosphodiester backbone. For example, in some embodiments, a nucleic acid is, comprises, or consists of one or more peptide nucleic acids. Alternatively, or additionally, in some embodiments, a nucleic acid has one or more phosphorothioate and/or 5′-N-phosphoramidite linkages rather than phosphodiester bonds. In some embodiments, a nucleic acid is, comprises, or consists of one or more natural nucleosides (e.g., adenosine, thymidine, guanosine, cytidine, uridine, deoxyadenosine, deoxythymidine, deoxy guanosine, and deoxycytidine). In some embodiments, a nucleic acid is, comprises, or consists of one or more nucleoside analogs (e.g., 2-aminoadenosine, 2-thiothymidine, inosine, pyrrolo-pyrimidine, 3-methyl adenosine, 5-methylcytidine, C-5 propynyl-cytidine, C-5 propynyl-uridine, 2-aminoadenosine, C5-bromouridine, C5-fluorouridine, C5-iodouridine, C5-propynyl-uridine, C5-propynyl-cytidine, C5-methylcytidine, 2-aminoadenosine, 7-deazaadenosine, 7-deazaguanosine, 8-oxoadenosine, 8-oxoguanosine, 0(6)-methylguanine, 2-thiocytidine, methylated bases, intercalated bases, and combinations thereof). In some embodiments, a nucleic acid comprises one or more modified sugars (e.g., 2′-fluororibose, ribose, 2′-deoxyribose, arabinose, and hexose) as compared with those in natural nucleic acids. In some embodiments, a nucleic acid has a nucleotide sequence that encodes a functional gene product such as an RNA or protein. In some embodiments, a nucleic acid includes one or more introns. In some embodiments, nucleic acids are prepared by one or more of isolation from a natural source, enzymatic synthesis by polymerization based on a complementary template (in vivo or in vitro), reproduction in a recombinant cell or system, and chemical synthesis. In some embodiments, a nucleic acid is at least 3, 4, 5, 6, 7, 8, 9, 10, 15, 20, 25, 30, 35, 40, 45, 50, 55, 60, 65, 70, 75, 80, 85, 90, 95, 100, 110, 120, 130, 140, 150, 160, 170, 180, 190, 20, 225, 250, 275, 300, 325, 350, 375, 400, 425, 450, 475, 500, 600, 700, 800, 900, 1000, 1500, 2000, 2500, 3000, 3500, 4000, 4500, 5000 or more residues long. In some embodiments, nucleic acids may have a length from about 2 to about 5000 nts, about 10 to about 100 nts, about 50 to about 150 nts, about 100 to about 200 nts, about 150 to about 250 nts, about 200 to about 300 nts, about 250 to about 350 nts, about 300 to about 500 nts, about 10 to about 1000 nts, about 50 to about 1000 nts, about 100 to about 1000 nts, about 1000 to about 2000 nts, about 2000 to about 3000 nts, about 3000 to about 4000 nts, about 4000 to about 5000 nts, or any range therebetween. In some embodiments, a nucleic acid is partly or wholly single stranded; in some embodiments, a nucleic acid is partly or wholly double stranded. In some embodiments a nucleic acid has a nucleotide sequence comprising at least one element that encodes, or is the complement of a sequence that encodes, a polypeptide. In some embodiments, a nucleic acid has enzymatic activity.

[0483] In some embodiments, a DNA-targeting moiety comprises or is nucleic acid.

[0484] In some embodiments, a nucleic acid that may be included in a moiety may be or comprise DNA, RNA, and/or an artificial or synthetic nucleic acid or nucleic acid analog or mimic. For example, in some embodiments, a nucleic acid may be or include one or more of genomic DNA (gDNA), complementary DNA (cDNA), a peptide nucleic acid (PNA), a peptide-nucleic acid mixmer, a peptide-oligonucleotide conjugate, a locked nucleic acid (LNA), a bridged nucleic acid (BNA), a polyamide, a triplex-forming oligonucleotide, an antisense oligonucleotide, tRNA, mRNA, rRNA, miRNA, gRNA, siRNA or other RNAi molecule (e.g., that targets a non-coding RNA as described herein and/or that targets an expression product of a particular gene associated with a targeted genomic complex as described herein), etc. A nucleic acid sequence may include modified oligonucleotides (e.g., chemical modifications, such as modifications that alter backbone linkages, sugar molecules, and/or nucleic acid bases) and/or artificial nucleic acids. In some embodiments, a nucleic acid sequence includes, but is not limited to, genomic DNA, cDNA, peptide nucleic acids (PNA) or peptide oligonucleotide conjugates, locked nucleic acids (LNA), bridged nucleic acids (BNA), polyamides, triplex forming oligonucleotides, modified DNA, antisense DNA oligonucleotides, tRNA, mRNA, rRNA, modified RNA, miRNA, gRNA, and siRNA or other RNA or DNA molecules. In some embodiments, a nucleic acid may include one or more residues that is not a naturally occurring DNA or RNA residue, may include one or more linkages that is/are not phosphodiester bonds (e.g., that may be, for example, phosphorothioate bonds, etc.), and/or may include one or more modifications such as, for example, a 2′O modification such as 2′-OMeP. A variety of nucleic acid structures useful in preparing synthetic nucleic acids is known in the art (see, for example, WO2017/0628621 and WO2014/012081) those skilled in the art will appreciate that these may be utilized in accordance with the present disclosure.

[0485] In some embodiments, a nucleic acid described herein comprises one or more nucleoside analogs. In some embodiments, a nucleic acid sequence may include in addition or as an alternative to one or more natural nucleosides, e.g., purines or pyrimidines, e.g., adenine, cytosine, guanine, thymine, and uracil, one or more nucleoside analogs. In some embodiments, a nucleic acid sequence includes one or more nucleoside analogs. A nucleoside analog may include, but is not limited to, a nucleoside analog, such as 5-fluorouracil; 5-bromouracil, 5-chlorouracil, 5-iodouracil, hypoxanthine, xanthine, 4-acetylcytosine, 4-methylbenzimidazole, 5-(carboxyhydroxylmethyl) uracil, 5-carboxymethylaminomethyl-2-thiouridine, 5-carboxymethylaminomethyluracil, dihydrouracil, dihydrouridine, beta-D-galactosylqueosine, inosine, N6-isopentenyladenine, 1-methylguanine, 1-methylinosine, 2,2-dimethylguanine, 2-methyladenine, 2-methylguanine, 3-methylcytosine, 5-methylcytosine, N6-adenine, 7-methylguanine, 5-methylaminomethyluracil, 5-methoxyaminomethyl-2-thiouracil, beta-D-mannosylqueosine, 5′-methoxycarboxymethyluracil, 5-methoxyuracil, 2-methylthio-N6-isopentenyladenine, uracil-5-oxyacetic acid (v), wybutoxosine, pseudouracil, queosine, 2-thiocytosine, 5-methyl-2-thiouracil, 2-thiouracil, 4-thiouracil, 5-methyluracil, uracil-5-oxyacetic acid methylester, uracil-5-oxyacetic acid (v), 5-methyl-2-thiouracil, 3-(3-amino-3-N-2-carboxypropyl) uracil, (acp3)w, 2,6-diaminopurine, 3-nitropyrrole, inosine, thiouridine, queuosine, wyosine, diaminopurine, isoguanine, isocytosine, diaminopyrimidine, 2,4-difluorotoluene, isoquinoline, pyrrolo[2,3-β]pyridine, and any others that can base pair with a purine or a pyrimidine side chain.

### CRISPR/Cas Domains

[0486] In some embodiments, a DNA-targeting moiety is or comprises a CRISPR/Cas molecule. A CRISPR/Cas molecule comprises a protein involved in the clustered regulatory interspaced short palindromic repeat (CRISPR) system, e.g., a Cas protein, and optionally a guide RNA, e.g., single guide RNA (sgRNA). In some embodiments, the gRNA comprised by the CRISPR/Cas molecule is noncovalently bound by the CRISPR/Cas protein.

[0487] CRISPR systems are adaptive defense systems originally discovered in bacteria and archaea. CRISPR systems use RNA-guided nucleases termed CRISPR-associated or “Cas” endonucleases (e. g., Cas9 or Cpf1) to cleave foreign DNA. For example, in a typical CRISPR/Cas system, an endonuclease is directed to a target nucleotide sequence (e. g., a site in the genome that is to be sequence-edited) by sequence-specific, non-coding “guide RNAs” that target single- or double-stranded DNA sequences. Three classes (1-111) of CRISPR systems have been identified. The class II CRISPR systems use a single Cas endonuclease (rather than multiple Cas proteins). One class II CRISPR system includes a type II Cas endonuclease such as Cas9, a CRISPR RNA (“crRNA”), and a trans-activating crRNA (“tracrRNA”). The crRNA contains a “guide RNA”, typically about 20-nucleotide RNA sequence that corresponds to a target DNA sequence. crRNA also contains a region that binds to the tracrRNA to form a partially double-stranded structure which is cleaved by RNase III, resulting in a crRNA/tracrRNA hybrid. A crRNA/tracrRNA hybrid then directs Cas9 endonuclease to recognize and cleave a target DNA sequence. A target DNA sequence must generally be adjacent to a “protospacer adjacent motif” (“PAM”) that is specific for a given Cas endonuclease; however, PAM sequences appear throughout a given genome. CRISPR endonucleases identified from various prokaryotic species have unique PAM sequence requirements; examples of PAM sequences include 5′-NGG (Streptococcus pyogenes), 5′-NNAGAA (Streptococcus thermophilus CRISPR1), 5′-NGGNG (Streptococcus thermophilus CRISPR3), and 5′-NNNGATT (Neisseria meningiditis). Some endonucleases, e.g., Cas9 endonucleases, are associated with G-rich PAM sites, e. g., 5′-NGG, and perform blunt-end cleaving of the target DNA at a location 3 nucleotides upstream from (5′ from) the PAM site. Another class II CRISPR system includes the type V endonuclease Cpf1, which is smaller than Cas9; examples include AsCpf1 (from Acidaminococcus sp.) and LbCpf1 (from Lachnospiraceae sp.). Cpf1-associated CRISPR arrays are processed into mature crRNAs without the requirement of a tracrRNA; in other words, a Cpf1 system requires only Cpf1 nuclease and a crRNA to cleave a target DNA sequence. Cpf1 endonucleases, are associated with T-rich PAM sites, e. g., 5′-TTN. Cpf1 can also recognize a 5′-CTA PAM motif. Cpf1 cleaves a target DNA by introducing an offset or staggered double-strand break with a 4- or 5-nucleotide 5′ overhang, for example, cleaving a target DNA with a 5-nucleotide offset or staggered cut located 18 nucleotides downstream from (3′ from) from a PAM site on the coding strand and 23 nucleotides downstream from the PAM site on the complimentary strand; the 5-nucleotide overhang that results from such offset cleavage allows more precise genome editing by DNA insertion by homologous recombination than by insertion at blunt-end cleaved DNA. See, e.g., Zetsche et al. (2015) Cell, 163:759-771.

[0488] A variety of CRISPR associated (Cas) genes or proteins can be used in the technologies provided by the present disclosure and the choice of Cas protein will depend upon the particular conditions of the method. Specific examples of Cas proteins include class II systems including Cas1, Cas2, Cas3, Cas4, Cas5, Cas6, Cas7, Cas8, Cas9, CasIO, Cpf1, C2C1, or C2C3. In some embodiments, a Cas protein, e.g., a Cas9 protein, may be from any of a variety of prokaryotic species. In some embodiments a particular Cas protein, e.g., a particular Cas9 protein, is selected to recognize a particular protospacer-adjacent motif (PAM) sequence. In some embodiments, a DNA-targeting moiety includes a sequence targeting polypeptide, such as a Cas protein, e.g., Cas9. In certain embodiments a Cas protein, e.g., a Cas9 protein, may be obtained from a bacteria or archaea or synthesized using known methods. In certain embodiments, a Cas protein may be from a gram-positive bacterium or a gram-negative bacterium. In certain embodiments, a Cas protein may be from a Streptococcus (e.g., S. pyogenes, or a S. thermophilus), a Francisella (e.g., an F. novicida), a Staphylococcus (e.g., an S. aureus), an Acidaminococcus (e.g., an Acidaminococcus sp. BV3L6), a Neisseria (e.g., an N. meningitidis), a Cryptococcus, a Corynebacterium, a Haemophilus, a Eubacterium, a Pasteurella, a Prevotella, a Veillonella, or a Marinobacter.

[0489] In some embodiments, a Cas protein requires a protospacer adjacent motif (PAM) to be present in or adjacent to a target DNA sequence for the Cas protein to bind and/or function. In some embodiments, the PAM is or comprises, from 5′ to 3′, NGG, YG, NNGRRT, NNNRRT, NGA, TYCV, TATV, NTTN, or NNNGATT, where N stands for any nucleotide, Y stands for C or T, R stands for A or G, and V stands for A or C or G. In some embodiments, a Cas protein is a protein listed in Table 1. In some embodiments, a Cas protein comprises one or more mutations altering its PAM. In some embodiments, a Cas protein comprises E1369R, E1449H, and R1556A mutations or analogous substitutions to the amino acids corresponding to said positions. In some embodiments, a Cas protein comprises E782K, N968K, and R1015H mutations or analogous substitutions to the amino acids corresponding to said positions. In some embodiments, a Cas protein comprises D1135V, R1335Q, and T1337R mutations or analogous substitutions to the amino acids corresponding to said positions. In some embodiments, a Cas protein comprises S542R and K607R mutations or analogous substitutions to the amino acids corresponding to said positions. In some embodiments, a Cas protein comprises S542R, K548V, and N552R mutations or analogous substitutions to the amino acids corresponding to said positions.

TABLE 1

| | | | | | Mutations to | |
|---|---|---|---|---|---|---|
| | | | # of | | alter PAM | Mutations to make |
| Name | Enzyme | Species | AAs | PAM | recognition | catalytically dead |
| FnCas9 | Cas9 | Francisella | 1629 | 5′-NGG-3′ | Wt | D11A/H969A/N995A |
| | | novicida | | | | |
| FnCas9 | Cas9 | Francisella | 1629 | 5′-YG-3′ | E1369R/E1449H/ | D11A/H969A/N995A |
| RHA | | novicida | | | R1556A | |
| SaCas9 | Cas9 | Staphylococcus | 1053 | 5′-NNGRRT-3′ | Wt | D10A/H557A |
| | | aureus | | | | |
| SaCas9 | Cas9 | Staphylococcus | 1053 | 5′-NNNRRT-3′ | E782K/N968K/ | D10A/H557A |
| KKH | | aureus | | | R1015H | |
| SpCas9 | Cas9 | Streptococcus | 1368 | 5′-NGG-3′ | Wt | D10A/D839A/H840A/ |
| | | pyogenes | | | | N863A |
| SpCas9 | Cas9 | Streptococcus | 1368 | 5′-NGA-3′ | D1135V/R1335Q/ | D10A/D839A/H840A/ |
| VQR | | pyogenes | | | T1337R | N863A |
| AsCpf1 | Cpf1 | Acidaminococcus sp. | 1307 | 5′-TYCV-3′ | S542R/K607R | E993A |
| RR | | BV3L6 | | | | |
| AsCpf1 | Cpf1 | Acidaminococcus sp. | 1307 | 5′-TATV-3′ | S542R/K548V/ | E993A |
| RVR | | BV3L6 | | | N552R | |
| FnCpf1 | Cpf1 | Francisella | 1300 | 5′-NTTN-3′ | Wt | D917A/E1006A/D1255A |
| | | novicida | | | | |
| NmCas9 | Cas9 | Neisseria | 1082 | 5′-NNNGATT-3′ | Wt | D16A/D587A/H588A/ |
| | | meningitidis | | | | N611A |

[0490] In some embodiments, the Cas protein is modified to deactivate the nuclease, e.g., nuclease deficient Cas9. Whereas wild-type Cas9 generates double-strand breaks (DSBs) at specific DNA sequences targeted by a gRNA, a number of CRISPR endonucleases having modified functionalities are available, for example: a “nickase” version of Cas9 generates only a single-strand break; a catalytically inactive Cas9 (“dCas9”) does not cut target DNA. In some embodiments, dCas9 binding to a DNA sequence may interfere with transcription at that site by steric hindrance. In some embodiments, a DNA-targeting moiety is or comprises a catalytically inactive Cas9, e.g., dCas9. In some embodiments, a DNA-targeting moiety is or comprises a catalytically inactive mutant Cas9, e.g., Cas9m4. Many catalytically inactive Cas9 proteins are known in the art. In some embodiments, dCas9 comprises mutations in each endonuclease domain of the Cas protein, e.g., D10A and H840A mutations.

[0491] In some embodiments, a catalytically inactive Cas9 protein, e.g., dCas9, comprises a D11A mutation or an analogous substitution to the amino acid corresponding to said position. In some embodiments, a catalytically inactive Cas9 protein, e.g., dCas9, comprises a H969A mutation or an analogous substitution to the amino acid corresponding to said position. In some embodiments, a catalytically inactive Cas9 protein, e.g., dCas9, comprises a N995A mutation or an analogous substitution to the amino acid corresponding to said position. In some embodiments, a catalytically inactive Cas9 protein, e.g., dCas9, comprises D11A, H969A, and N995A mutations or analogous substitutions to the amino acids corresponding to said positions.

[0492] In some embodiments, a catalytically inactive Cas9 protein, e.g., dCas9, comprises a D10A mutation or an analogous substitution to the amino acid corresponding to said position. In some embodiments, a catalytically inactive Cas9 protein, e.g., dCas9, comprises a H557A mutation or an analogous substitution to the amino acid corresponding to said position. In some embodiments, a catalytically inactive Cas9 protein, e.g., dCas9, comprises D10A and H557A mutations or analogous substitutions to the amino acids corresponding to said positions.

[0493] In some embodiments, a catalytically inactive Cas9 protein, e.g., dCas9, comprises a D839A mutation or an analogous substitution to the amino acid corresponding to said position. In some embodiments, a catalytically inactive Cas9 protein, e.g., dCas9, comprises a H840A mutation or an analogous substitution to the amino acid corresponding to said position. In some embodiments, a catalytically inactive Cas9 protein, e.g., dCas9, comprises a N863A mutation or an analogous substitution to the amino acid corresponding to said position. In some embodiments, a catalytically inactive Cas9 protein, e.g., dCas9, comprises D10A and D839A mutations or analogous substitutions to the amino acids corresponding to said positions. In some embodiments, a catalytically inactive Cas9 protein, e.g., dCas9, comprises D10A, D839A, and H840A mutations or analogous substitutions to the amino acids corresponding to said positions. In some embodiments, a catalytically inactive Cas9 protein, e.g., dCas9, comprises D10A, D839A, H840A, and N863A mutations or analogous substitutions to the amino acids corresponding to said positions.

[0494] In some embodiments, a catalytically inactive Cas9 protein, e.g., dCas9, comprises a E993A mutation or an analogous substitution to the amino acid corresponding to said position.

[0495] In some embodiments, a catalytically inactive Cas9 protein, e.g., dCas9, comprises a D917A mutation or an analogous substitution to the amino acid corresponding to said position. In some embodiments, a catalytically inactive Cas9 protein, e.g., dCas9, comprises a E1006A mutation or an analogous substitution to the amino acid corresponding to said position. In some embodiments, a catalytically inactive Cas9 protein, e.g., dCas9, comprises a D1255A mutation or an analogous substitution to the amino acid corresponding to said position. In some embodiments, a catalytically inactive Cas9 protein, e.g., dCas9, comprises D917A, E1006A, and D1255A mutations or analogous substitutions to the amino acids corresponding to said positions.

[0496] In some embodiments, a catalytically inactive Cas9 protein, e.g., dCas9, comprises a D16A mutation or an analogous substitution to the amino acid corresponding to said position. In some embodiments, a catalytically inactive Cas9 protein, e.g., dCas9, comprises a D587A mutation or an analogous substitution to the amino acid corresponding to said position. In some embodiments, a catalytically inactive Cas9 protein, e.g., dCas9, comprises a H588A mutation or an analogous substitution to the amino acid corresponding to said position. In some embodiments, a catalytically inactive Cas9 protein, e.g., dCas9, comprises a N611A mutation or an analogous substitution to the amino acid corresponding to said position. In some embodiments, a catalytically inactive Cas9 protein, e.g., dCas9, comprises D16A, D587A, H588A, and N611A mutations or analogous substitutions to the amino acids corresponding to said positions.

[0497] In another aspect, the disclosure is directed to an expression repressor or a polypeptide comprising one or more (e.g., one) DNA-targeting moiety and one or more repressor domain, wherein the one or more DNA-targeting moiety is or comprises a CRISPR/Cas molecule comprising a Cas protein, e.g., catalytically inactive Cas9 protein, e.g., dCas9, e.g., dCas9m4, or a functional variant or fragment thereof. In some embodiments, dCas9 comprises an amino acid sequence of SEQ ID NO: 46 or 88:

(SEQ ID NO: 46)
DKKYSIGLAIGTNSVGWAVITDEYKVPSKKFKVLGNTDRHSIKKNLIGALLFDSGETAEA
TRLKRTARRRYTRRKNRICYLQEIFSNEMAKVDDSFFHRLEESFLVEEDKKHERHPIFGNIVDEVA
YHEKYPTIYHLRKKLVDSTDKADLRLIYLALAHMIKFRGHFLIEGDLNPDNSDVDKLFIQLVQTY
NQLFEENPINASGVDAKAILSARLSKSRRLENLIAQLPGEKKNGLFGNLIALSLGLTPNFKSNFDL
AEDAKLQLSKDTYDDDLDNLLAQIGDQYADLFLAAKNLSDAILLSDILRVNTEITKAPLSASMIK
RYDEHHQDLTLLKALVRQQLPEKYKEIFFDQSKNGYAGYIDGGASQEEFYKFIKPILEKMDGTEE
LLVKLNREDLLRKQRTFDNGSIPHQIHLGELHAILRRQEDFYPFLKDNREKIEKILTFRIPYYVGPL
ARGNSRFAWMTRKSEETITPWNFEEVVDKGASAQSFIERMTNFDKNLPNEKVLPKHSLLYEYFT
VYNELTKVKYVTEGMRKPAFLSGEQKKAIVDLLFKTNRKVTVKQLKEDYFKKIECFDSVEISGV
EDRFNASLGTYHDLLKIIKDKDFLDNEENEDILEDIVLTLTLFEDREMIEERLKTYAHLFDDKVMK
QLKRRRYTGWGRLSRKLINGIRDKQSGKTILDFLKSDGFANRNFMQLIHDDSLTFKEDIQKAQVS
GQGDSLHEHIANLAGSPAIKKGILQTVKVVDELVKVMGRHKPENIVIEMARENQTTQKGQKNSR
ERMKRIEEGIKELGSQILKEHPVENTQLQNEKLYLYYLQNGRDMYVDQELDINRLSDYDVAAIV
PQSFLKDDSIDNKVLTRSDKARGKSDNVPSEEVVKKMKNYWRQLLNAKLITQRKFDNLTKAER
GGLSELDKAGFIKRQLVETRQITKHVAQILDSRMNTKYDENDKLIREVKVITLKSKLVSDFRKDF
QFYKVREINNYHHAHDAYLNAVVGTALIKKYPKLESEFVYGDYKVYDVRKMIAKSEQEIGKAT
AKYFFYSNIMNFFKTEITLANGEIRKRPLIETNGETGEIVWDKGRDFATVRKVLSMPQVNIVKKTE
VQTGGFSKESILPKRNSDKLIARKKDWDPKKYGGFDSPTVAYSVLVVAKVEKGKSKKLKSVKEL
LGITIMERSSFEKNPIDFLEAKGYKEVKKDLIIKLPKYSLFELENGRKRMLASAGELQKGNELALP
SKYVNFLYLASHYEKLKGSPEDNEQKQLFVEQHKHYLDEIIEQISEFSKRVILADANLDKVLSAY
NKHRDKPIREQAENIIHLFTLTNLGAPAAFKYFDTTIDRKRYTSTKEVLDATLIHQSITGLYETRID
LSQLGGD
(SEQ ID NO: 46)
AKRNYILGLAIGITSVGYGIIDYETRDVIDAGVRLFKEANVENNEGRRSKRGARRLKRRR
RHRIQRVKKLLFDYNLLTDHSELSGINPYEARVKGLSQKLSEEEFSAALLHLAKRRGVHNVNEVE
EDTGNELSTKEQISRNSKALEEKYVAELQLERLKKDGEVRGSINRFKTSDYVKEAKQLLKVQKA
YHQLDQSFIDTYIDLLETRRTYYEGPGEGSPFGWKDIKEWYEMLMGHCTYFPEELRSVKYAYNA
DLYNALNDLNNLVITRDENEKLEYYEKFQIIENVFKQKKKPTLKQIAKEILVNEEDIKGYRVTSTG
KPEFTNLKVYHDIKDITARKEIIENAELLDQIAKILTIYQSSEDIQEELTNLNSELTQEEIEQISNLKG
YTGTHNLSLKAINLILDELWHTNDNQIAIFNRLKLVPKKVDLSQQKEIPTTLVDDFILSPVVKRSFI
QSIKVINAIIKKYGLPNDIIIELAREKNSKDAQKMINEMQKRNRQTNERIEEIIRTTGKENAKYLIEK
IKLHDMQEGKCLYSLEAIPLEDLLNNPFNYEVDAIIPRSVSFDNSFNNKVLVKQEENSKKGNRTPF
QYLSSSDSKISYETFKKHILNLAKGKGRISKTKKEYLLEERDINRFSVQKDFINRNLVDTRYATRG
LMNLLRSYFRVNNLDVKVKSINGGFTSFLRRKWKFKKERNKGYKHHAEDALIIANADFIFKEWK
KLDKAKKVMENQMFEEKQAESMPEIETEQEYKEIFITPHQIKHIKDFKDYKYSHRVDKKPNRKLI
NDTLYSTRKDDKGNTLIVNNLNGLYDKDNDKLKKLINKSPEKLLMYHHDPQTYQKLKLIMEQY
GDEKNPLYKYYEETGNYLTKYSKKDNGPVIKKIKYYGNKLNAHLDITDDYPNSRNKVVKLSLKP
YRFDVYLDNGVYKFVTVKNLDVIKKENYYEVNSKCYEEAKKLKKISNQAEFIASFYKNDLIKIN
GELYRVIGVNNDLLNRIEVNMIDITYREYLENMNDKRPPHIIKTIASKTQSIKKYSTDILGNLYEVK
SKKHPQIIKKG

[0498] In some embodiments, the dCas9 is encoded by a nucleic acid sequence of SEQ ID NO: 45 or 89:

(SEQ ID NO: 45)
GACAAGAAGTACAGCATCGGCCTGGCCATCGGCACCAACAGCGTGGGCTGGGCCGTGATCA
CCGACGAGTACAAGGTGCCCAGCAAGAAGTTCAAGGTGCTGGGCAACACCGACCGGCACAG
CATCAAGAAGAACCTGATCGGCGCCCTGCTGTTCGACAGCGGCGAGACCGCCGAGGCCACC
CGGCTGAAGCGGACCGCCCGGCGGCGGTACACCCGGCGGAAGAACCGGATCTGCTACCTGC
AGGAGATCTTCAGCAACGAGATGGCCAAGGTGGACGACAGCTTCTTCCACCGGCTGGAGGA
GAGCTTCCTGGTGGAGGAGGACAAGAAGCACGAGCGGCACCCCATCTTCGGCAACATCGTG
GACGAGGTGGCCTACCACGAGAAGTACCCCACCATCTACCACCTGCGGAAGAAGCTGGTGG
ACAGCACCGACAAGGCCGACCTGCGGCTGATCTACCTGGCCCTGGCCCACATGATCAAGTTC
CGGGGCCACTTCCTGATCGAGGGCGACCTGAACCCCGACAACAGCGACGTGGACAAGCTGT
TCATCCAGCTGGTGCAGACCTACAACCAGCTGTTCGAGGAGAACCCCATCAACGCCAGCGG
CGTGGACGCCAAGGCCATCCTGAGCGCCCGGCTGAGCAAGAGCCGGCGGCTGGAGAACCTG
ATCGCCCAGCTGCCCGGCGAGAAGAAGAACGGCCTGTTCGGCAACCTGATCGCCCTGAGCC
TGGGCCTGACCCCCAACTTCAAGAGCAACTTCGACCTGGCCGAGGACGCCAAGCTGCAGCT
GAGCAAGGACACCTACGACGACGACCTGGACAACCTGCTGGCCCAGATCGGCGACCAGTAC
GCCGACCTGTTCCTGGCCGCCAAGAACCTGAGCGACGCCATCCTGCTGAGCGACATCCTGCG
GGTGAACACCGAGATCACCAAGGCCCCCCTGAGCGCCAGCATGATCAAGCGGTACGACGAG
CACCACCAGGACCTGACCCTGCTGAAGGCCCTGGTGCGGCAGCAGCTGCCCGAGAAGTACA
AGGAGATCTTCTTCGACCAGAGCAAGAACGGCTACGCCGGCTACATCGACGGCGGCGCCAG
CCAGGAGGAGTTCTACAAGTTCATCAAGCCCATCCTGGAGAAGATGGACGGCACCGAGGAG
CTGCTGGTGAAGCTGAACCGGGAGGACCTGCTGCGGAAGCAGCGGACCTTCGACAACGGCA
GCATCCCCCACCAGATCCACCTGGGCGAGCTGCACGCCATCCTGCGGCGGCAGGAGGACTTC
TACCCCTTCCTGAAGGACAACCGGGAGAAGATCGAGAAGATCCTGACCTTCCGGATCCCCTA
CTACGTGGGCCCCCTGGCCCGGGGCAACAGCCGGTTCGCCTGGATGACCCGGAAATCCGAG
GAGACCATCACCCCCTGGAACTTCGAGGAGGTGGTGGACAAGGGCGCCAGCGCCCAGAGCT
TCATCGAGCGGATGACCAACTTCGACAAGAACCTGCCCAACGAGAAGGTGCTGCCCAAGCA
CAGCCTGCTGTACGAGTACTTCACCGTGTACAACGAGCTGACCAAGGTGAAGTACGTGACCG
AGGGCATGCGGAAGCCCGCCTTCCTGAGCGGCGAGCAGAAGAAGGCCATCGTGGACCTGCT
GTTCAAGACCAACCGGAAGGTGACCGTGAAGCAGCTGAAGGAGGACTACTTCAAGAAGATC
GAGTGCTTCGACAGCGTGGAGATCAGCGGCGTGGAGGACCGGTTCAACGCCAGCCTGGGCA
CCTACCACGACCTGCTGAAGATCATCAAGGACAAGGACTTCCTGGACAACGAGGAGAACGA
GGACATCCTGGAGGACATCGTGCTGACCCTGACCCTGTTCGAGGACCGGGAGATGATCGAG
GAGCGGCTGAAAACCTACGCCCACCTGTTCGACGACAAGGTGATGAAGCAGCTGAAGCGGC
GGCGGTACACCGGCTGGGGCCGGCTGAGCCGGAAGCTGATCAACGGCATCCGGGACAAGCA
GAGCGGCAAGACCATCCTGGACTTCCTGAAATCCGACGGCTTCGCCAACCGGAACTTCATGC
AGCTGATCCACGACGACAGCCTGACCTTCAAGGAGGACATCCAGAAGGCCCAGGTGAGCGG
CCAGGGCGACAGCCTGCACGAGCACATCGCCAACCTGGCCGGCAGCCCCGCCATCAAGAAG
GGCATCCTGCAGACCGTGAAGGTGGTGGACGAGCTGGTGAAGGTGATGGGCCGGCACAAGC
CCGAGAACATCGTGATCGAGATGGCCCGGGAGAACCAGACCACCCAGAAGGGCCAGAAGA
ACAGCCGGGAGCGGATGAAGCGGATCGAGGAGGGCATCAAGGAGCTGGGCAGCCAGATCC
TGAAGGAGCACCCCGTGGAGAACACCCAGCTGCAGAACGAGAAGCTGTACCTGTACTACCT
GCAGAACGGCCGGGACATGTACGTGGACCAGGAGCTGGACATCAACCGGCTGAGCGACTAC
GACGTGGCCGCCATCGTGCCCCAGAGCTTCCTGAAGGACGACAGCATCGACAACAAGGTGC
TGACCCGGAGCGACAAGGCCCGGGGCAAGAGCGACAACGTGCCCAGCGAGGAGGTGGTGA
AGAAGATGAAGAACTACTGGCGGCAGCTGCTGAACGCCAAGCTGATCACCCAGCGGAAGTT
CGACAACCTGACCAAGGCCGAGCGGGGCGGCCTGAGCGAGCTGGACAAGGCCGGCTTCATC
AAGCGGCAGCTGGTGGAGACCCGGCAGATCACCAAGCACGTGGCCCAGATCCTGGACAGCC
GGATGAACACCAAGTACGACGAGAACGACAAGCTGATCCGGGAGGTGAAGGTGATCACCCT
GAAATCCAAGCTGGTGAGCGACTTCCGGAAGGACTTCCAGTTCTACAAGGTGCGGGAGATC
AACAACTACCACCACGCCCACGACGCCTACCTGAACGCCGTGGTGGGCACCGCCCTGATCA
AGAAGTACCCCAAGCTGGAGAGCGAGTTCGTGTACGGCGACTACAAGGTGTACGACGTGCG
GAAGATGATCGCCAAGAGCGAGCAGGAGATCGGCAAGGCCACCGCCAAGTACTTCTTCTAC
AGCAACATCATGAACTTCTTCAAGACCGAGATCACCCTGGCCAACGGCGAGATCCGGAAGC
GGCCCCTGATCGAGACCAACGGCGAGACCGGCGAGATCGTGTGGGACAAGGGCCGGGACTT
CGCCACCGTGCGGAAGGTGCTGAGCATGCCCCAGGTGAACATCGTGAAGAAAACCGAGGTG
CAGACCGGCGGCTTCAGCAAGGAGAGCATCCTGCCCAAGCGGAACAGCGACAAGCTGATCG
CCCGGAAGAAGGACTGGGACCCCAAGAAGTACGGCGGCTTCGACAGCCCCACCGTGGCCTA
CAGCGTGCTGGTGGTGGCCAAGGTGGAGAAGGGCAAGAGCAAGAAGCTGAAATCCGTGAA
GGAGCTGCTGGGCATCACCATCATGGAGCGGAGCAGCTTCGAGAAGAACCCCATCGACTTC
CTGGAGGCCAAGGGCTACAAGGAGGTGAAGAAGGACCTGATCATCAAGCTGCCCAAGTACA
GCCTGTTCGAGCTGGAGAACGGCCGGAAGCGGATGCTGGCCAGCGCCGGCGAGCTGCAGAA
GGGCAACGAGCTGGCCCTGCCCAGCAAGTACGTGAACTTCCTGTACCTGGCCAGCCACTACG
AGAAGCTGAAGGGCAGCCCCGAGGACAACGAGCAGAAGCAGCTGTTCGTGGAGCAGCACA
AGCACTACCTGGACGAGATCATCGAGCAGATCAGCGAGTTCAGCAAGCGGGTGATCCTGGC
CGACGCCAACCTGGACAAGGTGCTGAGCGCCTACAACAAGCACCGGGACAAGCCCATCCGG
GAGCAGGCCGAGAACATCATCCACCTGTTCACCCTGACCAACCTGGGCGCCCCCGCCGCCTT
CAAGTACTTCGACACCACCATCGACCGGAAGCGGTACACCAGCACCAAGGAGGTGCTGGAC
GCCACCCTGATCCACCAGAGCATCACCGGCCTGTACGAGACCCGGATCGACCTGAGCCAGCT
GGGCGGCGAC
(SEQ ID NO: 89)
GCCAAGCGGAACTACATCCTGGGCCTGGCCATCGGCATCACCAGCGTGGGCTACGGCATCAT
CGACTACGAGACCCGGGACGTGATCGACGCCGGCGTGCGGCTGTTCAAGGAGGCCAACGTG
GAGAACAACGAGGGCCGGCGGAGCAAGCGGGGCGCCCGGCGGCTGAAGCGGCGGCGGCGG
CACCGGATCCAGCGGGTGAAGAAGCTGCTGTTCGACTACAACCTGCTGACCGACCACAGCG
AGCTGAGCGGCATCAACCCCTACGAGGCCCGGGTGAAGGGCCTGAGCCAGAAGCTGAGCGA
GGAGGAGTTCAGCGCCGCCCTGCTGCACCTGGCCAAGCGGCGGGGCGTGCACAACGTGAAC
GAGGTGGAGGAGGACACCGGCAACGAGCTGAGCACCAAGGAGCAGATCAGCCGGAACAGC
AAGGCCCTGGAGGAGAAGTACGTGGCCGAGCTGCAGCTGGAGCGGCTGAAGAAGGACGGC
GAGGTGCGGGGCAGCATCAACCGGTTCAAGACCAGCGACTACGTGAAGGAGGCCAAGCAGC
TGCTGAAGGTGCAGAAGGCCTACCACCAGCTGGACCAGAGCTTCATCGACACCTACATCGA
CCTGCTGGAGACCCGGCGGACCTACTACGAGGGCCCCGGCGAGGGCAGCCCCTTCGGCTGG
AAGGACATCAAGGAGTGGTACGAGATGCTGATGGGCCACTGCACCTACTTCCCCGAGGAGC
TGCGGAGCGTGAAGTACGCCTACAACGCCGACCTGTACAACGCCCTGAACGACCTGAACAA
CCTGGTGATCACCCGGGACGAGAACGAGAAGCTGGAGTACTACGAGAAGTTCCAGATCATC
GAGAACGTGTTCAAGCAGAAGAAGAAGCCCACCCTGAAGCAGATCGCCAAGGAGATCCTGG
TGAACGAGGAGGACATCAAGGGCTACCGGGTGACCAGCACCGGCAAGCCCGAGTTCACCAA
CCTGAAGGTGTACCACGACATCAAGGACATCACCGCCCGGAAGGAGATCATCGAGAACGCC
GAGCTGCTGGACCAGATCGCCAAGATCCTGACCATCTACCAGAGCAGCGAGGACATCCAGG
AGGAGCTGACCAACCTGAACAGCGAGCTGACCCAGGAGGAGATCGAGCAGATCAGCAACCT
GAAGGGCTACACCGGCACCCACAACCTGAGCCTGAAGGCCATCAACCTGATCCTGGACGAG
CTGTGGCACACCAACGACAACCAGATCGCCATCTTCAACCGGCTGAAGCTGGTGCCCAAGA
AGGTGGACCTGAGCCAGCAGAAGGAGATCCCCACCACCCTGGTGGACGACTTCATCCTGAG
CCCCGTGGTGAAGCGGAGCTTCATCCAGAGCATCAAGGTGATCAACGCCATCATCAAGAAG
TACGGCCTGCCCAACGACATCATCATCGAGCTGGCCCGGGAGAAGAACAGCAAGGACGCCC
AGAAGATGATCAACGAGATGCAGAAGCGGAACCGGCAGACCAACGAGCGGATCGAGGAGA
TCATCCGGACCACCGGCAAGGAGAACGCCAAGTACCTGATCGAGAAGATCAAGCTGCACGA
CATGCAGGAGGGCAAGTGCCTGTACAGCCTGGAGGCCATCCCCCTGGAGGACCTGCTGAAC
AACCCCTTCAACTACGAGGTGGACGCCATCATCCCCCGGAGCGTGAGCTTCGACAACAGCTT
CAACAACAAGGTGCTGGTGAAGCAGGAGGAGAACAGCAAGAAGGGCAACCGGACCCCCTT
CCAGTACCTGAGCAGCAGCGACAGCAAGATCAGCTACGAGACCTTCAAGAAGCACATCCTG
AACCTGGCCAAGGGCAAGGGCCGGATCAGCAAGACCAAGAAGGAGTACCTGCTGGAGGAG
CGGGACATCAACCGGTTCAGCGTGCAGAAGGACTTCATCAACCGGAACCTGGTGGACACCC
GGTACGCCACCCGGGGCCTGATGAACCTGCTGCGGAGCTACTTCCGGGTGAACAACCTGGA
CGTGAAGGTGaaatccATCAACGGCGGCTTCACCAGCTTCCTGCGGCGGAAGTGGAAGTTCAAG
AAGGAGCGGAACAAGGGCTACAAGCACCACGCCGAGGACGCCCTGATCATCGCCAACGCCG
ACTTCATCTTCAAGGAGTGGAAGAAGCTGGACAAGGCCAAGAAGGTGATGGAGAACCAGAT
GTTCGAGGAGAAGCAGGCCGAGAGCATGCCCGAGATCGAGACCGAGCAGGAGTACAAGGA
GATCTTCATCACCCCCCACCAGATCAAGCACATCAAGGACTTCAAGGACTACAAGTACAGCC
ACCGGGTGGACAAGAAGCCCAACCGGAAGCTGATCAACGACACCCTGTACAGCACCCGGAA
GGACGACAAGGGCAACACCCTGATCGTGAACAACCTGAACGGCCTGTACGACAAGGACAAC
GACAAGCTGAAGAAGCTGATCAACAAGAGCCCCGAGAAGCTGCTGATGTACCACCACGACC
CCCAGACCTACCAGAAGCTGAAGCTGATCATGGAGCAGTACGGCGACGAGAAGAACCCCCT
GTACAAGTACTACGAGGAGACCGGCAACTACCTGACCAAGTACAGCAAGAAGGACAACGGC
CCCGTGATCAAGAAGATCAAGTACTACGGCAACAAGCTGAACGCCCACCTGGACATCACCG
ACGACTACCCCAACAGCCGGAACAAGGTGGTGAAGCTGAGCCTGAAGCCCTACCGGTTCGA
CGTGTACCTGGACAACGGCGTGTACAAGTTCGTGACCGTGAAGAACCTGGACGTGATCAAG
AAGGAGAACTACTACGAGGTGAACAGCAAGTGCTACGAGGAGGCCAAGAAGCTGAAGAAG
ATCAGCAACCAGGCCGAGTTCATCGCCAGCTTCTACAAGAACGACCTGATCAAGATCAACG
GCGAGCTGTACCGGGTGATCGGCGTGAACAACGACCTGCTGAACCGGATCGAGGTGAACAT
GATCGACATCACCTACCGGGAGTACCTGGAGAACATGAACGACAAGCGGCCCCCCCACATC
ATCAAGACCATCGCCAGCAAGACCCAGAGCATCAAGAAGTACAGCACCGACATCCTGGGCA
ACCTGTACGAGGTGaaatccAAGAAGCACCCCCAGATCATCAAGAAGGGC
Guide RNA (gRNA)

[0499] In some embodiments, a DNA-targeting moiety may comprise a Cas molecule comprising or linked (e.g., covalently) to a gRNA. A gRNA is a short synthetic RNA composed of a “scaffold” sequence necessary for Cas-protein binding and a user-defined ˜20 nucleotide targeting sequence for a genomic target. In practice, guide RNA sequences are generally designed to have a length of between 17-24 nucleotides (e.g., 19, 20, or 21 nucleotides) and be complementary to the targeted nucleic acid sequence. Custom gRNA generators and algorithms are available commercially for use in the design of effective guide RNAs. Gene editing has also been achieved using a chimeric “single guide RNA” (“sgRNA”), an engineered (synthetic) single RNA molecule that mimics a naturally occurring crRNA-tracrRNA complex and contains both a tracrRNA (for binding the nuclease) and at least one crRNA (to guide the nuclease to the sequence targeted for editing). Chemically modified sgRNAs have also been demonstrated to be effective for use with Cas proteins; see, for example, Hendel et al. (2015) Nature Biotechnol., 985-991.

[0500] In some embodiments, a gRNA comprises a nucleic acid sequence that is complementary to a DNA sequence associated with a target gene. In some embodiments, the DNA sequence is, comprises, or overlaps an expression control element that is operably linked to the target gene. In some embodiments, a gRNA comprises a nucleic acid sequence that is at least 90, 95, 99, or 100% complementary to a DNA sequence associated with a target gene. In some embodiments, a gRNA for use with a DNA-targeting moiety that comprises a Cas molecule is an sgRNA.

[0501] In some embodiments, a gRNA for use with a CRISPR/Cas molecule specifically binds a target sequence associated with β-2-microglobulin expression. Such a gRNA may comprise a target-binding sequence selected from:

| | GD-28228: |
|---|---|
| (SEQ ID NO: 1) | |
| | TCTCCTTGGTGGCCCGCCGT, |
| | GD-28229: |
| (SEQ ID NO: 2) | |
| | GTCCCAAAGGCGCGGCGCTG, |
| | GD-28171: |
| (SEQ ID NO: 3) | |
| | CCCTGCTCCCCGCCGAAAGGG, |
| | GD-28172: |
| (SEQ ID NO: 4) | |
| | CTCTGGCTCCCCCAGCGCAGC, |
| | or |
| | GD-28173: |
| (SEQ ID NO: 5) | |
| | GTGAACGCGTGGAGGGGCGCT |

[0502] In some embodiments, a gRNA for use with a CRISPR/Cas domain specifically binds a target sequence associated with CTCF. In some embodiments, a gRNA for use with a CRISPR/Cas domain specifically binds a target sequence associated with the promoter. In some embodiments the gRNA binds a target sequence listed in Table 3.

TABLE 3
Exemplary gRNA sequences

| | | | | SEQ |
|---|---|---|---|---|
| | | | Genomic | ID |
| Guide | Target | Target sequence | Coordinates | NO: |
| GD- | MYC | AGGGTGATGTTCATT | chr8:128746082- | 11 |
| 29639 | | AGCAG | 128746104 | |
| GD- | MYC | TGCAGAAGGTCCGAA | chr8:128746177- | 12 |
| 29640 | | GAAAG | 128746199 | |
| GD- | β2M | GAGACAGGTGACGGT | chr15:45003632- | 13 |
| 27634 | | CCCTG | 45003654 | |
| GD- | β2M | GAGTCTCGTGATGTT | chr15:45003545- | 14 |
| 29500 | | TAAGA | 45003567 | |
| GD- | HSPA1B | CCTGCCCTCTGATTG | chr6:31795352- | 17 |
| 29542 | | GTCCA | 31795374 | |
| GD- | HSPA1B | GCCTCATCGAGCTTG | chr6:31795429- | 18 |
| 29544 | | GTGAT | 31795451 | |
| GD- | GATA1 | CTGTGGTGTCAAAAG | chrX:48641126- | 19 |
| 29536 | | CACCA | 48641148 | |
| GD- | GATA1 | GAACCCCAGAAGATG | chrX:48641245- | 20 |
| 29693 | | CCAGG | 48641267 | |
| GD- | β2M | GGCGCGCACCCCAGA | chr15:45003481- | 21 |
| 29499 | promoter | TCGGA | 45003503 | |

[0503] In some embodiments, an expression repressor system comprises a first expression repressor comprising a first DNA-targeting moiety and a second expression repressor comprising a second DNA-targeting moiety, wherein the first DNA-targeting moiety comprises or is a first CRISPR/Cas molecule and the second DNA-targeting moiety comprises or is a second CRISPR/Cas molecule. In some embodiments, the first CRISPR/Cas molecule comprises a first CRISPR/Cas protein and first guide RNA, and the second CRISPR/Cas molecule comprises a second CRISPR/Cas protein and a second guide RNA. In some embodiments, the first CRISPR/Cas protein does not appreciably bind (e.g., does not bind) the second guide RNA, e.g., binds with a K_{D} of at least 10, 20, 50, 100, 1000, or 10,000 nM, and the second CRISPR/Cas protein does not appreciably bind (e.g., does not bind) the first guide RNA, e.g., binds with a K_{D} of at least 10, 20, 50, 100, 1000, or 10,000 nM.

### TAL Effector Domains

[0504] In some embodiments, a DNA-targeting moiety is or comprises a TAL effector molecule. A TAL effector molecule, e.g., a TAL effector molecule that specifically binds a DNA sequence, comprises a plurality of TAL effector domains or fragments thereof, and optionally one or more additional portions of naturally occurring TAL effectors (e.g., N- and/or C-terminal of the plurality of TAL effector domains). Many TAL effectors are known to those of skill in the art and are commercially available, e.g., from Thermo Fisher Scientific.

[0505] TALEs are natural effector proteins secreted by numerous species of bacterial pathogens including the plant pathogen Xanthomonas which modulates gene expression in host plants and facilitates bacterial colonization and survival. The specific binding of TAL effectors is based on a central repeat domain of tandemly arranged nearly identical repeats of typically 33 or 34 amino acids (the repeat-variable di-residues, RVD domain).

[0506] Members of the TAL effectors family differ mainly in the number and order of their repeats. The number of repeats ranges from 1.5 to 33.5 repeats and the C-terminal repeat is usually shorter in length (e.g., about 20 amino acids) and is generally referred to as a “half-repeat”. Each repeat of the TAL effector feature a one-repeat-to-one-base-pair correlation with different repeat types exhibiting different base-pair specificity (one repeat recognizes one base-pair on the target gene sequence). Generally, the smaller the number of repeats, the weaker the protein-DNA interactions. A number of 6.5 repeats has been shown to be sufficient to activate transcription of a reporter gene (Scholze et al., 2010).

[0507] Repeat to repeat variations occur predominantly at amino acid positions 12 and 13, which have therefore been termed “hypervariable” and which are responsible for the specificity of the interaction with the target DNA promoter sequence, as shown in Table 2 listing exemplary repeat variable di-residues (RVD) and their correspondence to nucleic acid base targets.

TABLE 2
RVDs and Nucleic Acid Base Specificity

| Target | Possible RVD Amino Acid Combinations | | | | | | | | | | | | |
|---|---|---|---|---|---|---|---|---|---|---|---|---|---|
| A | NI | NN | CI | HI | KI | | | | | | | | |
| G | NN | GN | SN | VN | LN | DN | QN | EN | HN | RH | NK | AN | FN |
| C | HD | RD | KD | ND | AD | | | | | | | | |
| T | NG | HG | VG | IG | EG | MG | YG | AA | EP | VA | QG | KG | RG |

[0508] Accordingly, it is possible to modify the repeats of a TAL effector to target specific DNA sequences. Further studies have shown that the RVD NK can target G. Target sites of TAL effectors also tend to include a T flanking the 5′ base targeted by the first repeat, but the exact mechanism of this recognition is not known. More than 113 TAL effector sequences are known to date. Non-limiting examples of TAL effectors from Xanthomonas include, Hax2, Hax3, Hax4, AvrXa7, AvrXa10 and AvrBs3.

[0509] Accordingly, the TAL effector domain of the TAL effector molecule of the present invention may be derived from a TAL effector from any bacterial species (e.g., Xanthomonas species such as the African strain of Xanthomonas oryzae pv. Oryzae (Yu et al. 2011), Xanthomonas campestris pv. raphani strain 756C and Xanthomonas oryzae pv. oryzicola strain BLS256 (Bogdanove et al. 2011). As used herein, the TAL effector domain in accordance with the present invention comprises an RVD domain as well as flanking sequence(s) (sequences on the N-terminal and/or C-terminal side of the RVD domain) also from the naturally occurring TAL effector. It may comprise more or fewer repeats than the RVD of the naturally occurring TAL effector. The TAL effector molecule of the present invention is designed to target a given DNA sequence based on the above code and others known in the art. The number of TAL effector domains (e.g., repeats (monomers or modules)) and their specific sequence are selected based on the desired DNA target sequence. For example, TAL effector domains, e.g., repeats, may be removed or added in order to suit a specific target sequence. In an embodiment, the TAL effector molecule of the present invention comprises between 6.5 and 33.5 TAL effector domains, e.g., repeats. In an embodiment, TAL effector molecule of the present invention comprises between 8 and 33.5 TAL effector domains, e.g., repeats, e.g., between 10 and 25 TAL effector domains, e.g., repeats, e.g., between 10 and 14 TAL effector domains, e.g., repeats.

[0510] In some embodiments, the TAL effector molecule comprises TAL effector domains that correspond to a perfect match to the DNA target sequence. In some embodiments, a mismatch between a repeat and a target base-pair on the DNA target sequence is permitted as along as it allows for the function of the expression repression system, e.g., the expression repressor comprising the TAL effector molecule. In general, TALE binding is inversely correlated with the number of mismatches. In some embodiments, the TAL effector molecule of an expression repressor of the present invention comprises no more than 7 mismatches, 6 mismatches, 5 mismatches, 4 mismatches, 3 mismatches, 2 mismatches, or 1 mismatch, and optionally no mismatch, with the target DNA sequence. Without wishing to be bound by theory, in general the smaller the number of TAL effector domains in the TAL effector molecule, the smaller the number of mismatches will be tolerated and still allow for the function of the expression repression system, e.g., the expression repressor comprising the TAL effector molecule. The binding affinity is thought to depend on the sum of matching repeat-DNA combinations. For example, TAL effector molecules having 25 TAL effector domains or more may be able to tolerate up to 7 mismatches.

[0511] In addition to the TAL effector domains, the TAL effector molecule of the present invention may comprise additional sequences derived from a naturally occurring TAL effector. The length of the C-terminal and/or N-terminal sequence(s) included on each side of the TAL effector domain portion of the TAL effector molecule can vary and be selected by one skilled in the art, for example based on the studies of Zhang et al. (2011). Zhang et al., have characterized a number of C-terminal and N-terminal truncation mutants in Hax3 derived TAL-effector based proteins and have identified key elements, which contribute to optimal binding to the target sequence and thus activation of transcription. Generally, it was found that transcriptional activity is inversely correlated with the length of N-terminus. Regarding the C-terminus, an important element for DNA binding residues within the first 68 amino acids of the Hax 3 sequence was identified. Accordingly, in some embodiments, the first 68 amino acids on the C-terminal side of the TAL effector domains of the naturally occurring TAL effector is included in the TAL effector molecule of an expression repressor of the present invention. Accordingly, in an embodiment, a TAL effector molecule of the present invention comprises 1) one or more TAL effector domains derived from a naturally occurring TAL effector; 2) at least 70, 80, 90, 100, 110, 120, 130, 140, 150, 170, 180, 190, 200, 220, 230, 240, 250, 260, 270, 280 or more amino acids from the naturally occurring TAL effector on the N-terminal side of the TAL effector domains; and/or 3) at least 68, 80, 90, 100, 110, 120, 130, 140, 150, 170, 180, 190, 200, 220, 230, 240, 250, 260 or more amino acids from the naturally occurring TAL effector on the C-terminal side of the TAL effector.

### Zn Finger Domains

[0512] In some embodiments, a DNA-targeting moiety is or comprises a Zn finger domain. A Zn finger domain comprises a Zn finger protein, e.g., a naturally occurring Zn finger protein or engineered Zn finger protein, or fragment thereof. Many Zn finger proteins are known to those of skill in the art and are commercially available, e.g., from Sigma-Aldrich.

[0513] In some embodiments, a Zn finger domain comprises a non-naturally occurring Zn finger protein that is engineered to bind to a target DNA sequence of choice. See, for example, Beerli, et al. (2002) Nature Biotechnol. 20:135-141; Pabo, et al. (2001) Ann. Rev. Biochem. 70:313-340; Isalan, et al. (2001) Nature Biotechnol. 19:656-660; Segal, et al. (2001) Curr. Opin. Biotechnol. 12:632-637; Choo, et al. (2000) Curr. Opin. Struct. Biol. 10:411-416; U.S. Pat. Nos. 6,453,242; 6,534,261; 6,599,692; 6,503,717; 6,689,558; 7,030,215; 6,794,136; 7,067,317; 7,262,054; 7,070,934; 7,361,635; 7,253,273; and U.S. Patent Publication Nos. 2005/0064474; 2007/0218528; 2005/0267061, all incorporated herein by reference in their entireties.

[0514] An engineered Zn finger protein may have a novel binding specificity, compared to a naturally occurring Zn finger protein. Engineering methods include, but are not limited to, rational design and various types of selection. Rational design includes, for example, using databases comprising triplet (or quadruplet) nucleotide sequences and individual Zn finger amino acid sequences, in which each triplet or quadruplet nucleotide sequence is associated with one or more amino acid sequences of zinc fingers which bind the particular triplet or quadruplet sequence. See, for example, U.S. Pat. Nos. 6,453,242 and 6,534,261, incorporated by reference herein in their entireties.

[0515] Exemplary selection methods, including phage display and two-hybrid systems, are disclosed in U.S. Pat. Nos. 5,789,538; 5,925,523; 6,007,988; 6,013,453; 6,410,248; 6,140,466; 6,200,759; and 6,242,568; as well as International Patent Publication Nos. WO 98/37186; WO 98/53057; WO 00/27878; and WO 01/88197 and GB 2,338,237. In addition, enhancement of binding specificity for zinc finger proteins has been described, for example, in International Patent Publication No. WO 02/077227.

[0516] In addition, as disclosed in these and other references, zinc finger domains and/or multi-fingered zinc finger proteins may be linked together using any suitable linker sequences, including for example, linkers of 5 or more amino acids in length. See, also, U.S. Pat. Nos. 6,479,626; 6,903,185; and 7,153,949 for exemplary linker sequences 6 or more amino acids in length. The proteins described herein may include any combination of suitable linkers between the individual zinc fingers of the protein. In addition, enhancement of binding specificity for zinc finger binding domains has been described, for example, in co-owned International Patent Publication No. WO 02/077227.

[0517] Zn finger proteins and methods for design and construction of fusion proteins (and polynucleotides encoding same) are known to those of skill in the art and described in detail in U.S. Pat. Nos. 6,140,0815; 789,538; 6,453,242; 6,534,261; 5,925,523; 6,007,988; 6,013,453; and 6,200,759; International Patent Publication Nos. WO 95/19431; WO 96/06166; WO 98/53057; WO 98/54311; WO 00/27878; WO 01/60970; WO 01/88197; WO 02/099084; WO 98/53058; WO 98/53059; WO 98/53060; WO 02/016536; and WO 03/016496.

[0518] In addition, as disclosed in these and other references, Zn finger proteins and/or multi-fingered Zn finger proteins may be linked together, e.g., as a fusion protein, using any suitable linker sequences, including for example, linkers of 5 or more amino acids in length. See, also, U.S. Pat. Nos. 6,479,626; 6,903,185; and 7,153,949 for exemplary linker sequences 6 or more amino acids in length. The Zn finger domains described herein may include any combination of suitable linkers between the individual zinc finger proteins and/or multi-fingered Zn finger proteins of the Zn finger domain.

[0519] In certain embodiments, the DNA-targeting moiety comprises a Zn finger domain comprising an engineered zinc finger protein that binds (in a sequence-specific manner) to a target DNA sequence. In some embodiments, the Zn finger domain comprises one Zn finger protein or fragment thereof. In other embodiments, the Zn finger domain comprises a plurality of Zn finger proteins (or fragments thereof), e.g., 2, 3, 4, 5, 6 or more Zn finger proteins (and optionally no more than 12, 11, 10, 9, 8, 7, 6, 5, 4, 3, or 2 Zn finger proteins). In some embodiments, the Zn finger domain comprises at least three Zn finger proteins. In some embodiments, the Zn finger domain comprises four, five or six fingers. In some embodiments, the Zn finger domain comprises 8, 9, 10, 11 or 12 fingers. In some embodiments, a Zn finger domain comprising three Zn finger proteins recognizes a target DNA sequence comprising 9 or 10 nucleotides. In some embodiments, a Zn finger domain comprising four Zn finger proteins recognizes a target DNA sequence comprising 12 to 14 nucleotides. In some embodiments, a Zn finger domain comprising six Zn finger proteins recognizes a target DNA sequence comprising 18 to 21 nucleotides.

[0520] In some embodiments, a Zn finger domain comprises a two-handed Zn finger protein. Two handed zinc finger proteins are those proteins in which two clusters of zinc finger proteins are separated by intervening amino acids so that the two zinc finger domains bind to two discontinuous target DNA sequences. An example of a two-handed type of zinc finger binding protein is SIP1, where a cluster of four zinc finger proteins is located at the amino terminus of the protein and a cluster of three Zn finger proteins is located at the carboxyl terminus (see Remade, et al. (1999) EMBO Journal 18(18):5073-5084). Each cluster of zinc fingers in these proteins is able to bind to a unique target sequence and the spacing between the two target sequences can comprise many nucleotides.

### Nucleic Acid Molecule

[0521] In some embodiments, a DNA-targeting moiety is or comprises a DNA-binding domain from a nuclease. For example, the recognition sequences of homing endonucleases and meganucleases such as T-SceI, I-CeuI, PI-PspI, PI-Sce, I-SceIV, I-CsmI, I-PanI, I-SceII, I-PpoI, I-SceIII, I-CreI, I-TevI, I-TevII and I-TevIII are known. See also U.S. Pat. Nos. 5,420,032; 6,833,252; Belfort, et al. (1997) Nucleic Acids Res. 25:3379-3388; Dujon, et al. (1989) Gene 82:115-118; Perler, et al. (1994) Nucleic Acids Res. 22:1125-1127; Jasin (1996) Trends Genet. 12:224-228; Gimble, et al. (1996) J. Mol. Biol. 263:163-180; Argast, et al. (1998) J. Mol. Biol. 280:345-353 and the New England Biolabs catalogue. In addition, the DNA-binding specificity of homing endonucleases and meganucleases can be engineered to bind non-natural target sites. See, for example, Chevalier, et al. (2002) Molec. Cell 10:895-905; Epinat, et al. (2003) Nucleic Acids Res. 31:2952-2962; Ashworth, et al. (2006) Nature 441:656-659; Paques, et al. (2007) Current Gene Therapy 7:49-66; U.S. Patent Publication No. 2007/0117128.

[0522] In some embodiments, a DNA-targeting moiety comprises or is nucleic acid. In some embodiments, a nucleic acid that may be included in a DNA-targeting moiety, may be or comprise DNA, RNA, and/or an artificial or synthetic nucleic acid or nucleic acid analog or mimic. For example, in some embodiments, a nucleic acid may be or include one or more of genomic DNA (gDNA), complementary DNA (cDNA), a peptide nucleic acid (PNA), a peptide-oligonucleotide conjugate, a locked nucleic acid (LNA), a bridged nucleic acid (BNA), a polyamide, a triplex-forming oligonucleotide, an antisense oligonucleotide, tRNA, mRNA, rRNA, miRNA, gRNA, siRNA or other RNAi molecule (e.g., that targets a non-coding RNA as described herein and/or that targets an expression product of a particular gene associated with a targeted genomic complex as described herein), etc. In some embodiments, a nucleic acid may include one or more residues that is not a naturally occurring DNA or RNA residue, may include one or more linkages that is/are not phosphodiester bonds (e.g., that may be, for example, phosphorothioate bonds, etc.), and/or may include one or more modifications such as, for example, a 2′O modification such as 2′-OMeP. A variety of nucleic acid structures useful in preparing synthetic nucleic acids is known in the art (see, for example, WO2017/0628621 and WO2014/012081) those skilled in the art will appreciate that these may be utilized in accordance with the present disclosure.

[0523] A nucleic acid suitable for use in an expression repressor, e.g., in the DNA-targeting moiety, may include, but is not limited to, DNA, RNA, modified oligonucleotides (e.g., chemical modifications, such as modifications that alter backbone linkages, sugar molecules, and/or nucleic acid bases), and artificial nucleic acids. In some embodiments, a nucleic acid includes, but is not limited to, genomic DNA, cDNA, peptide nucleic acids (PNA) or peptide oligonucleotide conjugates, locked nucleic acids (LNA), bridged nucleic acids (BNA), polyamides, triplex forming oligonucleotides, modified DNA, antisense DNA oligonucleotides, tRNA, mRNA, rRNA, modified RNA, miRNA, gRNA, and siRNA or other RNA or DNA molecules.

[0524] In some embodiments, a DNA-targeting moiety comprises a nucleic acid with a length from about 15-200, 20-200, 30-200, 40-200, 50-200, 60-200, 70-200, 80-200, 90-200, 100-200, 110-200, 120-200, 130-200, 140-200, 150-200, 160-200, 170-200, 180-200, 190-200, 215-190, 20-190, 30-190, 40-190, 50-190, 60-190, 70-190, 80-190, 90-190, 100-190, 110-190, 120-190, 130-190, 140-190, 150-190, 160-190, 170-190, 180-190, 15-180, 20-180, 30-180, 40-180, 50-180, 60-180, 70-180, 80-180, 90-180, 100-180, 110-180, 120-180, 130-180, 140-180, 150-180, 160-180, 170-180, 15-170, 20-170, 30-170, 40-170, 50-170, 60-170, 70-170, 80-170, 90-170, 100-170, 110-170, 120-170, 130-170, 140-170, 150-170, 160-170, 15-160, 20-160, 30-160, 40-160, 50-160, 60-160, 70-160, 80-160, 90-160, 100-160, 110-160, 120-160, 130-160, 140-160, 150-160, 215-150, 20-150, 30-150, 40-150, 50-150, 60-150, 70-150, 80-150, 90-150, 100-150, 110-150, 120-150, 130-150, 140-150, 15-140, 20-140, 30-140, 40-140, 50-140, 60-140, 70-140, 80-140, 90-140, 100-140, 110-140, 120-140, 130-140, 15-130, 20-130, 30-130, 40-130, 50-130, 60-130, 70-130, 80-130, 90-130, 100-130, 110-130, 120-130, 215-120, 20-120, 30-120, 40-120, 50-120, 60-120, 70-120, 80-120, 90-120, 100-120, 110-120, 15-110, 20-110, 30-110, 40-110, 50-110, 60-110, 70-110, 80-110, 90-110, 100-110, 15-100, 20-100, 30-100, 40-100, 50-100, 60-100, 70-100, 80-100, 90-100, 15-90, 20-90, 30-90, 40-90, 50-90, 60-90, 70-90, 80-90, 15-80, 20-80, 30-80, 40-80, 50-80, 60-80, 70-80, 15-70, 20-70, 30-70, 40-70, 50-70, 60-70, 15-60, 20-60, 30-60, 40-60, 50-60, 15-50, 20-50, 30-50, 40-50, 15-40, 20-40, 30-40, 15-30, 20-30, or 15-20 nucleotides, or any range therebetween.

### Repressor Domains

[0525] Expression repressors of the present disclosure comprise one or more repressor domains. A repressor domain has one or more functionality that, when used as part of an expressor repressor or an expression repression system described herein, decreases expression of a target gene in a cell. In some embodiments, a repressor domain comprises a histone modifying functionality, e.g., a histone methyltransferase, histone demethylase, or histone deacetylase activity. In some embodiments, a histone methyltransferase functionality comprises H3K9 targeting methyltransferase activity. In some embodiments, a histone methyltransferase functionality comprises H3K56 targeting methyltransferase activity. In some embodiments, a histone methyltransferase functionality comprises H3K27 targeting methyltransferase activity. In some embodiments, a histone methyltransferase or demethylase functionality transfers one, two, or three methyl groups. In some embodiments, a histone demethylase functionality comprises H3K4 targeting demethylase activity. In some embodiments, a repressor domain is or comprises a protein chosen from SETDB1, SETDB2, EHMT2 (i.e., G9A), EHMT1 (i.e., GLP), SUV39H1, EZH2, EZH1, SUV39H2, SETD8, SUV420H1, SUV420H2, or a functional variant or fragment of any thereof, e.g., a SET domain of any thereof. In some embodiments, a repressor domain is or comprises a protein chosen from KDM1A (i.e., LSD1), KDM1B (i.e., LSD2), KDM2A, KDM2B, KDM5A, KDM5B, KDM5C, KDM5D, KDM4B, N066, or a functional variant or fragment of any thereof. In some embodiments, a repressor domain is or comprises a protein chosen from HDAC1, HDAC2, HDAC3, HDAC4, HDAC5, HDAC6, HDAC7, HDAC8, HDAC9, HDAC10, HDAC11, SIRT1, SIRT2, SIRT3, SIRT4, SIRT5, SIRT6, SIRT7, SIRT8, SIRT9, or a functional variant or fragment of any thereof.

[0526] In some embodiments, a repressor domain comprises an epigenetic modifying moiety. In some embodiments, a repressor domain comprises a DNA modifying functionality, e.g., a DNA methyltransferase. In some embodiments, a repressor domain is or comprises a protein chosen from MQ1, DNMT1, DNMT3A1, DNMT3A2, DNMT3B1, DNMT3B2, DNMT3B3, DNMT3B4, DNMT3B5, DNMT3B6, DNMT3L, DNMT3a/3L or a functional variant or fragment of any thereof.

[0527] In some embodiments, a repressor domain comprises a transcription repressor. In some embodiments the transcription repressor blocks recruitment of a factor that stimulates or promotes transcription, e.g., of the target gene. In some embodiments, the transcription repressor recruits a factor that inhibits transcription, e.g., of the target gene. In some embodiments, a repressor domain, e.g., transcription repressor, is or comprises a protein chosen from KRAB, MeCP2, HP1, RBBP4, REST, FOG1, SUZ12, or a functional variant or fragment of any thereof.

[0528] In some embodiments a repressor domain promotes epigenetic modification, e.g., directly, or indirectly. For example, a repressor domain can indirectly promote epigenetic modification by recruiting an endogenous protein that epigenetically modifies the chromatin. In some embodiments, a repressor domain can directly promote epigenetic modification by catalyzing epigenetic modification, wherein the repressor domain comprises enzymatic activity and directly places an epigenetic mark on the chromatin.

[0529] In some embodiments, a repressor domain comprises a protein having a functionality described herein. In some embodiments, a repressor domain is or comprises a protein selected from:
[0530] KRAB (e.g., as according to NP_056209.2 or the protein encoded by NM_015394.5, e.g., as according to SEQ ID NO: 61);
[0531] a SET domain (e.g., the SET domain of:
[0532] SETDB1 (e.g., as according to NP_001353347.1 or the protein encoded by NM_001366418.1);
[0533] EZH2 (e.g., as according to NP-004447.2 or the protein encoded by NM_004456.5, e.g., as according to SEQ ID NO: 65);
[0534] G9A (e.g., as according to NP_001350618.1 or the protein encoded by NM_001363689.1; e.g., as according to SEQ ID NO: 62); or
[0535] SUV39H1 (e.g., as according to NP_003164.1 or the protein encoded by NM_003173.4)); histone demethylase LSD1 (e.g., as according to NP_055828.2 or the protein encoded by NM_015013.4, e.g., as according to SEQ ID NO: 64);
[0536] FOG1 (e.g., the N-terminal residues of FOG1) (e.g., as according to NP_722520.2 or the protein encoded by NM_153813.3, e.g., as according to SEQ ID NO: 66);
[0537] KAP1 (e.g., as according to NP_005753.1 or the protein encoded by NM_005762.3); or
[0538] HDAC8 (e.g., as according to NP_001159890 or the protein encoded by NM_001166418, e.g., as according to SEQ ID NO: 63);
[0539] a functional fragment or variant of any thereof, or
[0540] a polypeptide with a sequence that has at least 80, 85, 90, 91, 92, 93, 94, 95, 96, 97, 98, or 99% identity to any of the above-referenced sequences. In some embodiments, a repressor domain is or comprises a protein selected from:
[0541] DNMT3A (e.g., human DNMT3A) (e.g., as according to NP_072046.2 or the protein encoded by NM_022552.4, e.g., as according to SEQ ID NO: 58);
[0542] DNMT3B (e.g., as according to or AOX21819.1 or the protein encoded by NM_006892.4 or KX447429);
[0543] DNMT3L (e.g., as according to NP_787063.1 or the protein encoded by NM_175867.3);
[0544] DNMT3A/3L complex (e.g., as according to SEQ ID NO: 59 or 60), bacterial MQ1 (e.g., as according to CAA35058.1 or P15840.3, e.g., as according to SEQ ID NO: 57 or 90);
[0545] a functional fragment of any thereof, or
[0546] a polypeptide with a sequence that has at least 80, 85, 90, 91, 92, 93, 94, 95, 96, 97, 98, or 99% identity to any of the above-referenced sequences.

[0547] In some embodiments, a repressor domain is or comprises a polypeptide. In some embodiments, a repressor domain has enzymatic activity.

[0548] In some embodiments, a DNA-binding domain comprises a helix-hairpin-helix (HhH) motif. DNA-binding proteins with a HhH structural motif may be involved in non-sequence-specific DNA binding that occurs via the formation of hydrogen bonds between protein backbone nitrogens and DNA phosphate groups.

[0549] In some embodiments, a DNA-binding domain comprises a helix-loop-helix (HLH) motif. DNA-binding proteins with an HLH structural motif are transcriptional regulatory proteins and are principally related to a wide array of developmental processes. An HLH structural motif is longer, in terms of residues, than HTH or HhH motifs. Many of these proteins interact to form homo- and hetero-dimers. A structural motif is composed of two long helix regions, with an N-terminal helix binding to DNA, while a complex region allows the protein to dimerize.

[0550] In some embodiments, a DNA-binding domain comprises a leucine zipper motif. In some transcription factors, a dimer binding site with DNA forms a leucine zipper. This motif includes two amphipathic helices, one from each subunit, interacting with each other resulting in a left-handed coiled-coil super secondary structure. A leucine zipper is an interdigitation of regularly spaced leucine residues in one helix with leucines from an adjacent helix. Mostly, helices involved in leucine zippers exhibit a heptad sequence (abcdefg) with residues a and d being hydrophobic and other residues being hydrophilic. Leucine zipper motifs can mediate either homo- or heterodimer formation.

[0551] In some embodiments, a DNA-binding domain comprises a Zn finger domain, where a Zn++ ion is coordinated by 2 Cys and 2 His residues. Such a transcription factor includes a trimer with the stoichiometry ββ′α. An apparent effect of Zn++ coordination is stabilization of a small complex structure instead of hydrophobic core residues. Each Zn-finger interacts in a conformationally identical manner with successive triple base pair segments in the major groove of the double helix. Protein-DNA interaction is determined by two factors: (i) H-bonding interaction between α-helix and DNA segment, mostly between Arg residues and Guanine bases. (ii) H-bonding interaction with DNA phosphate backbone, mostly with Arg and His. An alternative Zn-finger motif chelates Zn++ with 6 Cys.

[0552] An exemplary repressor domain may include, but is not limited to: ubiquitin, bicyclic peptides as ubiquitin ligase inhibitors, transcription factors, DNA and protein modification enzymes such as topoisomerases, topoisomerase inhibitors such as topotecan, DNA methyltransferases such as the DNMT family (e.g., DNMT3A, DNMT3B, DNMT3L), protein methyltransferases (e.g., viral lysine methyltransferase (vSET), protein-lysine N-methyltransferase (SMYD2), deaminases (e.g., APOBEC, UG1), histone methyltransferases such as enhancer of zeste homolog 2 (EZH2), PRMT1, histone-lysine-N-methyltransferase (Setdb1), histone methyltransferase (SET2), euchromatic histone-lysine N-methyltransferase 2 (G9A), histone-lysine N-methyltransferase (SUV39H1), and G9a), histone deacetylase (e.g., HDAC1, HDAC2, HDAC3, HDAC8), enzymes with a role in DNA demethylation (e.g., the TET family enzymes catalyze oxidation of 5-methylcytosine to 5-hydroxymethylcytosine and higher oxidative derivatives), protein demethylases such as KDM1A and lysine-specific histone demethylase 1 (LSD1), transcription repressors (e.g., KRAB, FOG1), helicases such as DHX9, deacetylases (e.g., sirtuin 1, 2, 3, 4, 5, 6, or 7), kinases, phosphatases, DNA-intercalating agents such as ethidium bromide, SYBR green, and proflavine, efflux pump inhibitors such as peptidomimetics like phenylalanine arginyl 0-naphthylamide or quinoline derivatives, nuclear receptor activators and inhibitors, proteasome inhibitors, competitive inhibitors for enzymes such as those involved in lysosomal storage diseases, protein synthesis inhibitors, nucleases (e.g., Cpf1, Cas9, zinc finger nuclease), fusions of one or more thereof (e.g., dCas9-DNMT, dCas9-APOBEC, dCas9-UG1), and specific domains from proteins, such as a KRAB domain.

[0553] In some embodiments, a candidate domain may be determined to be suitable for use as a repressor domain by methods known to those of skill in the art. For example, a candidate repressor domain may be tested by assaying whether, when the candidate repressor domain is present in the nucleus of a cell and appropriately localized (e.g., to a target gene or transcription control element operably linked to said target gene, e.g., via a DNA-targeting moiety), the candidate repressor domain decreases expression of the target gene in the cell, e.g., decreases the level of RNA transcript encoded by the target gene (e.g., as measured by RNASeq or Northern blot) or decreases the level of protein encoded by the target gene (e.g., as measured by ELISA).

[0554] In some embodiments, an expression repression system comprises a plurality of expression repressors, wherein each member of the plurality of expression repressors comprises a repressor domain, wherein each repressor domain does not detectably bind, e.g., does not bind, to another repressor domain. In some embodiments, an expression repression system comprises a first expression repressor comprising a first repressor domain and a second expression repressor comprising a second repressor domain, wherein the first repressor domain does not detectably bind, e.g., does not bind, to the second repressor domain. In some embodiments, an expression repression system comprises a first expression repressor comprising a first repressor domain and a second expression repressor comprising a second repressor domain, wherein the first repressor domain does not detectably bind, e.g., does not bind, to another first repressor domain, and the second repressor domain does not detectably bind, e.g., does not bind, to another second repressor domain. In some embodiments, a repressor domain for use in the compositions and methods described herein is functional in a monomeric, e.g., non-dimeric, state.

[0555] In some embodiments, a repressor domain is or comprises an epigenetic modifying moiety, e.g., that modulates the two-dimensional structure of chromatin (i.e., that modulate structure of chromatin in a way that would alter its two-dimensional representation).

[0556] Epigenetic modifying moieties useful in methods and compositions of the present disclosure include agents that affect epigenetic markers, e.g., DNA methylation, histone methylation, histone acetylation, histone sumoylation, histone phosphorylation, and RNA-associated silencing. Exemplary epigenetic enzymes that can be targeted to a genomic sequence element as described herein include DNA methylases (e.g., DNMT3a, DNMT3b, DNMTL), DNA demethylation (e.g., the TET family), histone methyltransferases, histone deacetylase (e.g., HDAC1, HDAC2, HDAC3), sirtuin 1, 2, 3, 4, 5, 6, or 7, lysine-specific histone demethylase 1 (LSD1), histone-lysine-N-methyltransferase (Setdb1), euchromatic histone-lysine N-methyltransferase 2 (G9a), histone-lysine N-methyltransferase (SUV39H1), enhancer of zeste homolog 2 (EZH2), viral lysine methyltransferase (vSET), histone methyltransferase (SET2), and protein-lysine N-methyltransferase (SMYD2). Examples of such epigenetic modifying agents are described, e.g., in de Groote et al. Nuc. Acids Res. (2012):1-18.

[0557] In some embodiments, an expression repressor, e.g., comprising an epigenetic modifying moiety, useful herein comprises or is a construct described in Koferle et al. Genome Medicine 7.59 (2015):1-3 incorporated herein by reference. For example, in some embodiments, an expression repressor comprises or is a construct found in Table 1 of Koferle et al., e.g., histone deacetylase, histone methyltransferase, DNA demethylation, or H3K4 and/or H3K9 histone demethylase described in Table 1 (e.g., dCas9-β300, TALE-TET1, ZF-DNMT3A, or TALE-LSD1).

### Additional Moieties

[0558] An expression repressor may further comprise one or more additional moieties (e.g., in addition to one or more DNA-targeting moieties and one or more repressor domains). In some embodiments, an additional moiety is selected from a tagging or monitoring moiety, a cleavable moiety (e.g., a cleavable moiety positioned between a DNA-targeting moiety and a repressor domain or at the N- or C-terminal end of a polypeptide), a small molecule, a membrane translocating polypeptide, or a pharmacoagent moiety.

### Exemplary Expression Repressors

[0559] The following exemplary expression repressors are presented for illustration purposes only and are not intended to be limiting.

[0560] In some embodiments, an expression repressor comprises a DNA-targeting moiety comprising dCas9, e.g., an S. aureus dCas9, and a repressor domain comprising MQ1, e.g., bacterial MQ1. In some embodiments, the expression repressor is encoded by the nucleic acid sequence of SEQ ID NO: 91 (e.g., a plasmid encoding the expression repressor), SEQ ID NO: 22 (e.g., a nucleic acid (e.g., cDNA) encoding the expression repressor) and/or SEQ ID NO: 92 (e.g., a nucleic acid (e.g., cDNA) encoding the expression repressor). In some embodiments, a nucleic acid described herein comprises a nucleic acid sequence of SEQ ID NO: 22, 91 or 92 or a sequence with at least 80, 85, 90, 95, 99, or 100% identity thereto, or having no more than 20, 19, 18, 17, 16, 15, 14, 13, 12, 11, 10, 9, 8, 7, 6, 5, 4, 3, 2, or 1 positions of difference thereto. In some embodiments, the DNA-targeting moiety is encoded by the nucleic acid sequence of SEQ ID NO: 45 or 89 and/or the repressor domain is encoded by the nucleic acid sequence of SEQ ID NO: 47.

dCas9-MQ1 (MR-28125) mRNA sequence:
(SEQ ID NO: 22)
AGGAAATAAGAGAGAAAAGAAGAGTAAGAAGAAATATAAGAGCCACCATGGCCCCCAAGAA
GAAGCGGAAGGTGGGCATCCACGGCGTGCCCGCCGCCGACAAGAAGTACAGCATCGGCCTG
GCCATCGGCACCAACAGCGTGGGCTGGGCCGTGATCACCGACGAGTACAAGGTGCCCAGCA
AGAAGTTCAAGGTGCTGGGCAACACCGACCGGCACAGCATCAAGAAGAACCTGATCGGCGC
CCTGCTGTTCGACAGCGGCGAGACCGCCGAGGCCACCCGGCTGAAGCGGACCGCCCGGCGG
CGGTACACCCGGCGGAAGAACCGGATCTGCTACCTGCAGGAGATCTTCAGCAACGAGATGG
CCAAGGTGGACGACAGCTTCTTCCACCGGCTGGAGGAGAGCTTCCTGGTGGAGGAGGACAA
GAAGCACGAGCGGCACCCCATCTTCGGCAACATCGTGGACGAGGTGGCCTACCACGAGAAG
TACCCCACCATCTACCACCTGCGGAAGAAGCTGGTGGACAGCACCGACAAGGCCGACCTGC
GGCTGATCTACCTGGCCCTGGCCCACATGATCAAGTTCCGGGGCCACTTCCTGATCGAGGG
CGACCTGAACCCCGACAACAGCGACGTGGACAAGCTGTTCATCCAGCTGGTGCAGACCTAC
AACCAGCTGTTCGAGGAGAACCCCATCAACGCCAGCGGCGTGGACGCCAAGGCCATCCTGA
GCGCCCGGCTGAGCAAGAGCCGGCGGCTGGAGAACCTGATCGCCCAGCTGCCCGGCGAGAA
GAAGAACGGCCTGTTCGGCAACCTGATCGCCCTGAGCCTGGGCCTGACCCCCAACTTCAAG
AGCAACTTCGACCTGGCCGAGGACGCCAAGCTGCAGCTGAGCAAGGACACCTACGACGACG
ACCTGGACAACCTGCTGGCCCAGATCGGCGACCAGTACGCCGACCTGTTCCTGGCCGCCAA
GAACCTGAGCGACGCCATCCTGCTGAGCGACATCCTGCGGGTGAACACCGAGATCACCAAG
GCCCCCCTGAGCGCCAGCATGATCAAGCGGTACGACGAGCACCACCAGGACCTGACCCTGC
TGAAGGCCCTGGTGCGGCAGCAGCTGCCCGAGAAGTACAAGGAGATCTTCTTCGACCAGAG
CAAGAACGGCTACGCCGGCTACATCGACGGCGGCGCCAGCCAGGAGGAGTTCTACAAGTTC
ATCAAGCCCATCCTGGAGAAGATGGACGGCACCGAGGAGCTGCTGGTGAAGCTGAACCGGG
AGGACCTGCTGCGGAAGCAGCGGACCTTCGACAACGGCAGCATCCCCCACCAGATCCACCT
GGGCGAGCTGCACGCCATCCTGCGGCGGCAGGAGGACTTCTACCCCTTCCTGAAGGACAAC
CGGGAGAAGATCGAGAAGATCCTGACCTTCCGGATCCCCTACTACGTGGGCCCCCTGGCCC
GGGGCAACAGCCGGTTCGCCTGGATGACCCGGAAATCCGAGGAGACCATCACCCCCTGGAA
CTTCGAGGAGGTGGTGGACAAGGGCGCCAGCGCCCAGAGCTTCATCGAGCGGATGACCAAC
TTCGACAAGAACCTGCCCAACGAGAAGGTGCTGCCCAAGCACAGCCTGCTGTACGAGTACT
TCACCGTGTACAACGAGCTGACCAAGGTGAAGTACGTGACCGAGGGCATGCGGAAGCCCGC
CTTCCTGAGCGGCGAGCAGAAGAAGGCCATCGTGGACCTGCTGTTCAAGACCAACCGGAAG
GTGACCGTGAAGCAGCTGAAGGAGGACTACTTCAAGAAGATCGAGTGCTTCGACAGCGTGG
AGATCAGCGGCGTGGAGGACCGGTTCAACGCCAGCCTGGGCACCTACCACGACCTGCTGAA
GATCATCAAGGACAAGGACTTCCTGGACAACGAGGAGAACGAGGACATCCTGGAGGACATC
GTGCTGACCCTGACCCTGTTCGAGGACCGGGAGATGATCGAGGAGCGGCTGAAAACCTACG
CCCACCTGTTCGACGACAAGGTGATGAAGCAGCTGAAGCGGCGGCGGTACACCGGCTGGGG
CCGGCTGAGCCGGAAGCTGATCAACGGCATCCGGGACAAGCAGAGCGGCAAGACCATCCTG
GACTTCCTGAAATCCGACGGCTTCGCCAACCGGAACTTCATGCAGCTGATCCACGACGACA
GCCTGACCTTCAAGGAGGACATCCAGAAGGCCCAGGTGAGCGGCCAGGGCGACAGCCTGCA
CGAGCACATCGCCAACCTGGCCGGCAGCCCCGCCATCAAGAAGGGCATCCTGCAGACCGTG
AAGGTGGTGGACGAGCTGGTGAAGGTGATGGGCCGGCACAAGCCCGAGAACATCGTGATCG
AGATGGCCCGGGAGAACCAGACCACCCAGAAGGGCCAGAAGAACAGCCGGGAGCGGATGAA
GCGGATCGAGGAGGGCATCAAGGAGCTGGGCAGCCAGATCCTGAAGGAGCACCCCGTGGAG
AACACCCAGCTGCAGAACGAGAAGCTGTACCTGTACTACCTGCAGAACGGCCGGGACATGT
ACGTGGACCAGGAGCTGGACATCAACCGGCTGAGCGACTACGACGTGGCCGCCATCGTGCC
CCAGAGCTTCCTGAAGGACGACAGCATCGACAACAAGGTGCTGACCCGGAGCGACAAGGCC
CGGGGCAAGAGCGACAACGTGCCCAGCGAGGAGGTGGTGAAGAAGATGAAGAACTACTGGC
GGCAGCTGCTGAACGCCAAGCTGATCACCCAGCGGAAGTTCGACAACCTGACCAAGGCCGA
GCGGGGCGGCCTGAGCGAGCTGGACAAGGCCGGCTTCATCAAGCGGCAGCTGGTGGAGACC
CGGCAGATCACCAAGCACGTGGCCCAGATCCTGGACAGCCGGATGAACACCAAGTACGACG
AGAACGACAAGCTGATCCGGGAGGTGAAGGTGATCACCCTGAAATCCAAGCTGGTGAGCGA
CTTCCGGAAGGACTTCCAGTTCTACAAGGTGCGGGAGATCAACAACTACCACCACGCCCAC
GACGCCTACCTGAACGCCGTGGTGGGCACCGCCCTGATCAAGAAGTACCCCAAGCTGGAGA
GCGAGTTCGTGTACGGCGACTACAAGGTGTACGACGTGCGGAAGATGATCGCCAAGAGCGA
GCAGGAGATCGGCAAGGCCACCGCCAAGTACTTCTTCTACAGCAACATCATGAACTTCTTC
AAGACCGAGATCACCCTGGCCAACGGCGAGATCCGGAAGCGGCCCCTGATCGAGACCAACG
GCGAGACCGGCGAGATCGTGTGGGACAAGGGCCGGGACTTCGCCACCGTGCGGAAGGTGCT
GAGCATGCCCCAGGTGAACATCGTGAAGAAAACCGAGGTGCAGACCGGCGGCTTCAGCAAG
GAGAGCATCCTGCCCAAGCGGAACAGCGACAAGCTGATCGCCCGGAAGAAGGACTGGGACC
CCAAGAAGTACGGCGGCTTCGACAGCCCCACCGTGGCCTACAGCGTGCTGGTGGTGGCCAA
GGTGGAGAAGGGCAAGAGCAAGAAGCTGAAATCCGTGAAGGAGCTGCTGGGCATCACCATC
ATGGAGCGGAGCAGCTTCGAGAAGAACCCCATCGACTTCCTGGAGGCCAAGGGCTACAAGG
AGGTGAAGAAGGACCTGATCATCAAGCTGCCCAAGTACAGCCTGTTCGAGCTGGAGAACGG
CCGGAAGCGGATGCTGGCCAGCGCCGGCGAGCTGCAGAAGGGCAACGAGCTGGCCCTGCCC
AGCAAGTACGTGAACTTCCTGTACCTGGCCAGCCACTACGAGAAGCTGAAGGGCAGCCCCG
AGGACAACGAGCAGAAGCAGCTGTTCGTGGAGCAGCACAAGCACTACCTGGACGAGATCAT
CGAGCAGATCAGCGAGTTCAGCAAGCGGGTGATCCTGGCCGACGCCAACCTGGACAAGGTG
CTGAGCGCCTACAACAAGCACCGGGACAAGCCCATCCGGGAGCAGGCCGAGAACATCATCC
ACCTGTTCACCCTGACCAACCTGGGCGCCCCCGCCGCCTTCAAGTACTTCGACACCACCAT
CGACCGGAAGCGGTACACCAGCACCAAGGAGGTGCTGGACGCCACCCTGATCCACCAGAGC
ATCACCGGCCTGTACGAGACCCGGATCGACCTGAGCCAGCTGGGCGGCGACAAGCGGCCCG
CCGCCACCAAGAAGGCCGGCCAGGCCAAGAAGAAGAAGGCCCGGGACAGCAAGGTGGAGAA
CAAGACCAAGAAGCTGCGGGTGTTCGAGGCCTTCGCCGGCATCGGCGCCCAGCGGAAGGCC
CTGGAGAAGGTGCGGAAGGACGAGTACGAGATCGTGGGCCTGGCCGAGTGGTACGTGCCCG
CCATCGTGATGTACCAGGCCATCCACAACAACTTCCACACCAAGCTGGAGTACAAGAGCGT
GAGCCGGGAGGAGATGATCGACTACCTGGAGAACAAGACCCTGAGCTGGAACAGCAAGAAC
CCCGTGAGCAACGGCTACTGGAAGCGGAAGAAGGACGACGAGCTGAAGATCATCTACAACG
CCATCAAGCTGAGCGAGAAGGAGGGCAACATCTTCGACATCCGGGACCTGTACAAGCGGAC
CCTGAAGAACATCGACCTGCTGACCTACAGCTTCCCCTGCCAGGACCTGAGCCAGCAGGGC
ATCCAGAAGGGCATGAAGCGGGGCAGCGGCACCCGGAGCGGCCTGCTGTGGGAGATCGAGC
GGGCCCTGGACAGCACCGAGAAGAACGACCTGCCCAAGTACCTGCTGATGGAGAACGTGGG
CGCCCTGCTGCACAAGAAGAACGAGGAGGAGCTGAACCAGTGGAAGCAGAAGCTGGAGAGC
CTGGGCTACCAGAACAGCATCGAGGTGCTGAACGCCGCCGACTTCGGCAGCAGCCAGGCCC
GGCGGCGGGTGTTCATGATCAGCACCCTGAACGAGTTCGTGGAGCTGCCCAAGGGCGACAA
GAAGCCCAAGAGCATCAAGAAGGTGCTGAACAAGATCGTGAGCGAGAAGGACATCCTGAAC
AACCTGCTGAAGTACAACCTGACCGAGTTCAAGAAAACCAAGAGCAACATCAACAAGGCCA
GCCTGATCGGCTACAGCAAGTTCAACAGCGAGGGCTACGTGTACGACCCCGAGTTCACCGG
CCCCACCCTGACCGCCAGCGGCGCCAACAGCCGGATCAAGATCAAGGACGGCAGCAACATC
CGGAAGATGAACAGCGACGAGACCTTCCTGTACATCGGCTTCGACAGCCAGGACGGCAAGC
GGGTGAACGAGATCGAGTTCCTGACCGAGAACCAGAAGATCTTCGTGTGCGGCAACAGCAT
CAGCGTGGAGGTGCTGGAGGCCATCATCGACAAGATCGGCGGCCCCAGCAGCGGCGGCAAG
CGGCCCGCCGCCACCAAGAAGGCCGGCCAGGCCAAGAAGAAGAAGGGCAGCTACCCCTACG
ACGTGCCCGACTACGCCTGAGCGGCCGCTTAATTAAGCTGCCTTCTGCGGGGCTTGCCTTC
TGGCCATGCCCTTCTTCTCTCCCTTGCACCTGTACCTCTTGGTCTTTGAATAAAGCCTGAG
TAGGAAGTCTAGAAAAAAAAAAAAAAAAAAAAAAAAAAAAAAAAAAAAAAAAAAAAAAAAA
AAAAAAAAAAAAAAAAAAAAAAAAAAAAAAA
Sa-dCas9-MQ1 (PL-27695) Plasmid DNA sequence:
(SEQ ID NO: 91)
TCGCGCGTTTCGGTGATGACGGTGAAAACCTCTGACACATGCAGCTCCCGGAGACGGTCAC
AGCTTGTCTGTAAGCGGATGCCGGGAGCAGACAAGCCCGTCAGGGCGCGTCAGCGGGTGTT
GGCGGGTGTCGGGGCTGGCTTAACTATGCGGCATCAGAGCAGATTGTACTGAGAGTGCACC
ATATGCGGTGTGAAATACCGCACAGATGCGTAAGGAGAAAATACCGCATCAGGCGCCATTC
GCCATTCAGGCTGCGCAACTGTTGGGAAGGGCGATCGGTGCGGGCCTCTTCGCTATTACGC
CAGCTGGCGAAAGGGGGATGTGCTGCAAGGCGATTAAGTTGGGTAACGCCAGGGTTTTCCC
AGTCACGACGTTGTAAAACGACGGCCAGTGAATTGACGCGTATTGGGATGGTACCTAATAC
GACTCACTATAAGGAAATAAGAGAGAAAAGAAGAGTAAGAAGAAATATAAGAGCCACCATG
GCCCCCAAGAAGAAGCGGAAGGTGGGCATCCACGGCGTGCCCGCCGCCGCCAAGCGGAACT
ACATCCTGGGCCTGGCCATCGGCATCACCAGCGTGGGCTACGGCATCATCGACTACGAGAC
CCGGGACGTGATCGACGCCGGCGTGCGGCTGTTCAAGGAGGCCAACGTGGAGAACAACGAG
GGCCGGCGGAGCAAGCGGGGCGCCCGGCGGCTGAAGCGGCGGCGGCGGCACCGGATCCAGC
GGGTGAAGAAGCTGCTGTTCGACTACAACCTGCTGACCGACCACAGCGAGCTGAGCGGCAT
CAACCCCTACGAGGCCCGGGTGAAGGGCCTGAGCCAGAAGCTGAGCGAGGAGGAGTTCAGC
GCCGCCCTGCTGCACCTGGCCAAGCGGCGGGGCGTGCACAACGTGAACGAGGTGGAGGAGG
ACACCGGCAACGAGCTGAGCACCAAGGAGCAGATCAGCCGGAACAGCAAGGCCCTGGAGGA
GAAGTACGTGGCCGAGCTGCAGCTGGAGCGGCTGAAGAAGGACGGCGAGGTGCGGGGCAGC
ATCAACCGGTTCAAGACCAGCGACTACGTGAAGGAGGCCAAGCAGCTGCTGAAGGTGCAGA
AGGCCTACCACCAGCTGGACCAGAGCTTCATCGACACCTACATCGACCTGCTGGAGACCCG
GCGGACCTACTACGAGGGCCCCGGCGAGGGCAGCCCCTTCGGCTGGAAGGACATCAAGGAG
TGGTACGAGATGCTGATGGGCCACTGCACCTACTTCCCCGAGGAGCTGCGGAGCGTGAAGT
ACGCCTACAACGCCGACCTGTACAACGCCCTGAACGACCTGAACAACCTGGTGATCACCCG
GGACGAGAACGAGAAGCTGGAGTACTACGAGAAGTTCCAGATCATCGAGAACGTGTTCAAG
CAGAAGAAGAAGCCCACCCTGAAGCAGATCGCCAAGGAGATCCTGGTGAACGAGGAGGACA
TCAAGGGCTACCGGGTGACCAGCACCGGCAAGCCCGAGTTCACCAACCTGAAGGTGTACCA
CGACATCAAGGACATCACCGCCCGGAAGGAGATCATCGAGAACGCCGAGCTGCTGGACCAG
ATCGCCAAGATCCTGACCATCTACCAGAGCAGCGAGGACATCCAGGAGGAGCTGACCAACC
TGAACAGCGAGCTGACCCAGGAGGAGATCGAGCAGATCAGCAACCTGAAGGGCTACACCGG
CACCCACAACCTGAGCCTGAAGGCCATCAACCTGATCCTGGACGAGCTGTGGCACACCAAC
GACAACCAGATCGCCATCTTCAACCGGCTGAAGCTGGTGCCCAAGAAGGTGGACCTGAGCC
AGCAGAAGGAGATCCCCACCACCCTGGTGGACGACTTCATCCTGAGCCCCGTGGTGAAGCG
GAGCTTCATCCAGAGCATCAAGGTGATCAACGCCATCATCAAGAAGTACGGCCTGCCCAAC
GACATCATCATCGAGCTGGCCCGGGAGAAGAACAGCAAGGACGCCCAGAAGATGATCAACG
AGATGCAGAAGCGGAACCGGCAGACCAACGAGCGGATCGAGGAGATCATCCGGACCACCGG
CAAGGAGAACGCCAAGTACCTGATCGAGAAGATCAAGCTGCACGACATGCAGGAGGGCAAG
TGCCTGTACAGCCTGGAGGCCATCCCCCTGGAGGACCTGCTGAACAACCCCTTCAACTACG
AGGTGGACGCCATCATCCCCCGGAGCGTGAGCTTCGACAACAGCTTCAACAACAAGGTGCT
GGTGAAGCAGGAGGAGAACAGCAAGAAGGGCAACCGGACCCCCTTCCAGTACCTGAGCAGC
AGCGACAGCAAGATCAGCTACGAGACCTTCAAGAAGCACATCCTGAACCTGGCCAAGGGCA
AGGGCCGGATCAGCAAGACCAAGAAGGAGTACCTGCTGGAGGAGCGGGACATCAACCGGTT
CAGCGTGCAGAAGGACTTCATCAACCGGAACCTGGTGGACACCCGGTACGCCACCCGGGGC
CTGATGAACCTGCTGCGGAGCTACTTCCGGGTGAACAACCTGGACGTGAAGGTGaaatccA
TCAACGGCGGCTTCACCAGCTTCCTGCGGCGGAAGTGGAAGTTCAAGAAGGAGCGGAACAA
GGGCTACAAGCACCACGCCGAGGACGCCCTGATCATCGCCAACGCCGACTTCATCTTCAAG
GAGTGGAAGAAGCTGGACAAGGCCAAGAAGGTGATGGAGAACCAGATGTTCGAGGAGAAGC
AGGCCGAGAGCATGCCCGAGATCGAGACCGAGCAGGAGTACAAGGAGATCTTCATCACCCC
CCACCAGATCAAGCACATCAAGGACTTCAAGGACTACAAGTACAGCCACCGGGTGGACAAG
AAGCCCAACCGGAAGCTGATCAACGACACCCTGTACAGCACCCGGAAGGACGACAAGGGCA
ACACCCTGATCGTGAACAACCTGAACGGCCTGTACGACAAGGACAACGACAAGCTGAAGAA
GCTGATCAACAAGAGCCCCGAGAAGCTGCTGATGTACCACCACGACCCCCAGACCTACCAG
AAGCTGAAGCTGATCATGGAGCAGTACGGCGACGAGAAGAACCCCCTGTACAAGTACTACG
AGGAGACCGGCAACTACCTGACCAAGTACAGCAAGAAGGACAACGGCCCCGTGATCAAGAA
GATCAAGTACTACGGCAACAAGCTGAACGCCCACCTGGACATCACCGACGACTACCCCAAC
AGCCGGAACAAGGTGGTGAAGCTGAGCCTGAAGCCCTACCGGTTCGACGTGTACCTGGACA
ACGGCGTGTACAAGTTCGTGACCGTGAAGAACCTGGACGTGATCAAGAAGGAGAACTACTA
CGAGGTGAACAGCAAGTGCTACGAGGAGGCCAAGAAGCTGAAGAAGATCAGCAACCAGGCC
GAGTTCATCGCCAGCTTCTACAAGAACGACCTGATCAAGATCAACGGCGAGCTGTACCGGG
TGATCGGCGTGAACAACGACCTGCTGAACCGGATCGAGGTGAACATGATCGACATCACCTA
CCGGGAGTACCTGGAGAACATGAACGACAAGCGGCCCCCCCACATCATCAAGACCATCGCC
AGCAAGACCCAGAGCATCAAGAAGTACAGCACCGACATCCTGGGCAACCTGTACGAGGTGa
aatccAAGAAGCACCCCCAGATCATCAAGAAGGGCAAGCGGCCCGCCGCCACCAAGAAGGC
CGGCCAGGCCAAGAAGAAGAAGGCCCGGGACAGCAAGGTGGAGAACAAGACCAAGAAGCTG
CGGGTGTTCGAGGCCTTCGCCGGCATCGGCGCCCAGCGGAAGGCCCTGGAGAAGGTGCGGA
AGGACGAGTACGAGATCGTGGGCCTGGCCGAGTGGTACGTGCCCGCCATCGTGATGTACCA
GGCCATCCACAACAACTTCCACACCAAGCTGGAGTACAAGAGCGTGAGCCGGGAGGAGATG
ATCGACTACCTGGAGAACAAGACCCTGAGCTGGAACAGCAAGAACCCCGTGAGCAACGGCT
ACTGGAAGCGGAAGAAGGACGACGAGCTGAAGATCATCTACAACGCCATCAAGCTGAGCGA
GAAGGAGGGCAACATCTTCGACATCCGGGACCTGTACAAGCGGACCCTGAAGAACATCGAC
CTGCTGACCTACAGCTTCCCCTGCCAGGACCTGAGCCAGCAGGGCATCCAGAAGGGCATGA
AGCGGGGCAGCGGCACCCGGAGCGGCCTGCTGTGGGAGATCGAGCGGGCCCTGGACAGCAC
CGAGAAGAACGACCTGCCCAAGTACCTGCTGATGGAGAACGTGGGCGCCCTGCTGCACAAG
AAGAACGAGGAGGAGCTGAACCAGTGGAAGCAGAAGCTGGAGAGCCTGGGCTACCAGAACA
GCATCGAGGTGCTGAACGCCGCCGACTTCGGCAGCAGCCAGGCCCGGCGGCGGGTGTTCAT
GATCAGCACCCTGAACGAGTTCGTGGAGCTGCCCAAGGGCGACAAGAAGCCCAAGAGCATC
AAGAAGGTGCTGAACAAGATCGTGAGCGAGAAGGACATCCTGAACAACCTGCTGAAGTACA
ACCTGACCGAGTTCAAGAAaACCAAGAGCAACATCAACAAGGCCAGCCTGATCGGCTACAG
CAAGTTCAACAGCGAGGGCTACGTGTACGACCCCGAGTTCACCGGCCCCACCCTGACCGCC
AGCGGCGCCAACAGCCGGATCAAGATCAAGGACGGCAGCAACATCCGGAAGATGAACAGCG
ACGAGACCTTCCTGTACATCGGCTTCGACAGCCAGGACGGCAAGCGGGTGAACGAGATCGA
GTTCCTGACCGAGAACCAGAAGATCTTCGTGTGCGGCAACAGCATCAGCGTGGAGGTGCTG
GAGGCCATCATCGACAAGATCGGCGGCCCCAGCAGCGGCGGCAAGCGGCCCGCCGCCACCA
AGAAGGCCGGCCAGGCCAAGAAGAAGAAGGGCAGCTACCCCTACGACGTGCCCGACTACGC
CTGAGcggccgcttaattaagctgccttctgcggggcttgccttctggccatgcccttctt
ctctcccttgcacctgtacctcttggtctttgaataaagcctgagtaggaagtctagaaaa
aaaaaaaaaaaaaaaaaaaaaaaaaaaaaaaaaaaaaaaaaaaaaaaaaaaaaaaaaaaaa
aaaaaaaaaaaaaaattgtcttcttcatcgcctgcagATCCCAATGGCGCGCCGAGCTTGG
CTCGAGCATGGTCATAGCTGTTTCCTGTGTGAAATTGTTATCCGCTCACAATTCCACACAA
CATACGAGCCGGAAGCATAAAGTGTAAAGCCTGGGGTGCCTAATGAGTGAGCTAACTCACA
TTAATTGCGTTGCGCTCACTGCCCGCTTTCCAGTCGGGAAACCTGTCGTGCCAGCTGCATT
AATGAATCGGCCAACGCGCGGGGAGAGGCGGTTTGCGTATTGGGCGCTCTTCCGCTTCCTC
GCTCACTGACTCGCTGCGCTCGGTCGTTCGGCTGCGGCGAGCGGTATCAGCTCACTCAAAG
GCGGTAATACGGTTATCCACAGAATCAGGGGATAACGCAGGAAAGAACATGTGAGCAAAAG
GCCAGCAAAAGGCCAGGAACCGTAAAAAGGCCGCGTTGCTGGCGTTTTTCCATAGGCTCCG
CCCCCCTGACGAGCATCACAAAAATCGACGCTCAAGTCAGAGGTGGCGAAACCCGACAGGA
CTATAAAGATACCAGGCGTTTCCCCCTGGAAGCTCCCTCGTGCGCTCTCCTGTTCCGACCC
TGCCGCTTACCGGATACCTGTCCGCCTTTCTCCCTTCGGGAAGCGTGGCGCTTTCTCATAG
CTCACGCTGTAGGTATCTCAGTTCGGTGTAGGTCGTTCGCTCCAAGCTGGGCTGTGTGCAC
GAACCCCCCGTTCAGCCCGACCGCTGCGCCTTATCCGGTAACTATCGTCTTGAGTCCAACC
CGGTAAGACACGACTTATCGCCACTGGCAGCAGCCACTGGTAACAGGATTAGCAGAGCGAG
GTATGTAGGCGGTGCTACAGAGTTCTTGAAGTGGTGGCCTAACTACGGCTACACTAGAAGA
ACAGTATTTGGTATCTGCGCTCTGCTGAAGCCAGTTACCTTCGGAAAAAGAGTTGGTAGCT
CTTGATCCGGCAAACAAACCACCGCTGGTAGCGGTGGTTTTTTTGTTTGCAAGCAGCAGAT
TACGCGCAGAAAAAAAGGATCTCAAGAAGATCCTTTGATCTTTTCTACGGGGTCTGACGCT
CAGTGGAACGAAAACTCACGTTAAGGGATTTTGGTCATGAGATTATCAAAAAGGATCTTCA
CCTAGATCCTTTTAAATTAAAAATGAAGTTTTAAATCAATCTAAAGTATATATGAGTAAAC
TTGGTCTGACAGTTAGAAAAACTCATCGAGCATCAAATGAAACTGCAATTTATTCATATCA
GGATTATCAATACCATATTTTTGAAAAAGCCGTTTCTGTAATGAAGGAGAAAACTCACCGA
GGCAGTTCCATAGGATGGCAAGATCCTGGTATCGGTCTGCGATTCCGACTCGTCCAACATC
AATACAACCTATTAATTTCCCCTCGTCAAAAATAAGGTTATCAAGTGAGAAATCACCATGA
GTGACGACTGAATCCGGTGAGAATGGCAAAAGTTTATGCATTTCTTTCCAGACTTGTTCAA
CAGGCCAGCCATTACGCTCGTCATCAAAATCACTCGCATCAACCAAACCGTTATTCATTCG
TGATTGCGCCTGAGCGAGACGAAATACGCGATCGCTGTTAAAAGGACAATTACAAACAGGA
ATCGAATGCAACCGGCGCAGGAACACTGCCAGCGCATCAACAATATTTTCACCTGAATCAG
GATATTCTTCTAATACCTGGAATGCTGTTTTCCCAGGGATCGCAGTGGTGAGTAACCATGC
ATCATCAGGAGTACGGATAAAATGCTTGATGGTCGGAAGAGGCATAAATTCCGTCAGCCAG
TTTAGTCTGACCATCTCATCTGTAACATCATTGGCAACGCTACCTTTGCCATGTTTCAGAA
ACAACTCTGGCGCATCGGGCTTCCCATACAATCGATAGATTGTCGCACCTGATTGCCCGAC
ATTATCGCGAGCCCATTTATACCCATATAAATCAGCATCCATGTTGGAATTTAATCGCGGC
CTAGAGCAAGACGTTTCCCGTTGAATATGGCTCATACTCTTCCTTTTTCAATATTATTGAA
GCATTTATCAGGGTTATTGTCTCATGAGCGGATACATATTTGAATGTATTTAGAAAAATAA
ACAAATAGGGGTTCCGCGCACATTTCCCCGAAAAGTGCCACCTGACGTCTAAGAAACCATT
ATTATCATGACATTAACCTATAAAAATAGGCGTATCACGAGGCCCTTTCGTC
Sa-dCas9-MQ1 (MR-28126) Expressed mRNA sequence:
(SEQ ID NO: 92)
AGGAAATAAGAGAGAAAAGAAGAGTAAGAAGAAATATAAGAGCCACCATGGCCCCCAAGAA
GAAGCGGAAGGTGGGCATCCACGGCGTGCCCGCCGCCGCCAAGCGGAACTACATCCTGGGC
CTGGCCATCGGCATCACCAGCGTGGGCTACGGCATCATCGACTACGAGACCCGGGACGTGA
TCGACGCCGGCGTGCGGCTGTTCAAGGAGGCCAACGTGGAGAACAACGAGGGCCGGCGGAG
CAAGCGGGGCGCCCGGCGGCTGAAGCGGCGGCGGCGGCACCGGATCCAGCGGGTGAAGAAG
CTGCTGTTCGACTACAACCTGCTGACCGACCACAGCGAGCTGAGCGGCATCAACCCCTACG
AGGCCCGGGTGAAGGGCCTGAGCCAGAAGCTGAGCGAGGAGGAGTTCAGCGCCGCCCTGCT
GCACCTGGCCAAGCGGCGGGGCGTGCACAACGTGAACGAGGTGGAGGAGGACACCGGCAAC
GAGCTGAGCACCAAGGAGCAGATCAGCCGGAACAGCAAGGCCCTGGAGGAGAAGTACGTGG
CCGAGCTGCAGCTGGAGCGGCTGAAGAAGGACGGCGAGGTGCGGGGCAGCATCAACCGGTT
CAAGACCAGCGACTACGTGAAGGAGGCCAAGCAGCTGCTGAAGGTGCAGAAGGCCTACCAC
CAGCTGGACCAGAGCTTCATCGACACCTACATCGACCTGCTGGAGACCCGGCGGACCTACT
ACGAGGGCCCCGGCGAGGGCAGCCCCTTCGGCTGGAAGGACATCAAGGAGTGGTACGAGAT
GCTGATGGGCCACTGCACCTACTTCCCCGAGGAGCTGCGGAGCGTGAAGTACGCCTACAAC
GCCGACCTGTACAACGCCCTGAACGACCTGAACAACCTGGTGATCACCCGGGACGAGAACG
AGAAGCTGGAGTACTACGAGAAGTTCCAGATCATCGAGAACGTGTTCAAGCAGAAGAAGAA
GCCCACCCTGAAGCAGATCGCCAAGGAGATCCTGGTGAACGAGGAGGACATCAAGGGCTAC
CGGGTGACCAGCACCGGCAAGCCCGAGTTCACCAACCTGAAGGTGTACCACGACATCAAGG
ACATCACCGCCCGGAAGGAGATCATCGAGAACGCCGAGCTGCTGGACCAGATCGCCAAGAT
CCTGACCATCTACCAGAGCAGCGAGGACATCCAGGAGGAGCTGACCAACCTGAACAGCGAG
CTGACCCAGGAGGAGATCGAGCAGATCAGCAACCTGAAGGGCTACACCGGCACCCACAACC
TGAGCCTGAAGGCCATCAACCTGATCCTGGACGAGCTGTGGCACACCAACGACAACCAGAT
CGCCATCTTCAACCGGCTGAAGCTGGTGCCCAAGAAGGTGGACCTGAGCCAGCAGAAGGAG
ATCCCCACCACCCTGGTGGACGACTTCATCCTGAGCCCCGTGGTGAAGCGGAGCTTCATCC
AGAGCATCAAGGTGATCAACGCCATCATCAAGAAGTACGGCCTGCCCAACGACATCATCAT
CGAGCTGGCCCGGGAGAAGAACAGCAAGGACGCCCAGAAGATGATCAACGAGATGCAGAAG
CGGAACCGGCAGACCAACGAGCGGATCGAGGAGATCATCCGGACCACCGGCAAGGAGAACG
CCAAGTACCTGATCGAGAAGATCAAGCTGCACGACATGCAGGAGGGCAAGTGCCTGTACAG
CCTGGAGGCCATCCCCCTGGAGGACCTGCTGAACAACCCCTTCAACTACGAGGTGGACGCC
ATCATCCCCCGGAGCGTGAGCTTCGACAACAGCTTCAACAACAAGGTGCTGGTGAAGCAGG
AGGAGAACAGCAAGAAGGGCAACCGGACCCCCTTCCAGTACCTGAGCAGCAGCGACAGCAA
GATCAGCTACGAGACCTTCAAGAAGCACATCCTGAACCTGGCCAAGGGCAAGGGCCGGATC
AGCAAGACCAAGAAGGAGTACCTGCTGGAGGAGCGGGACATCAACCGGTTCAGCGTGCAGA
AGGACTTCATCAACCGGAACCTGGTGGACACCCGGTACGCCACCCGGGGCCTGATGAACCT
GCTGCGGAGCTACTTCCGGGTGAACAACCTGGACGTGAAGGTGaaatccATCAACGGCGGC
TTCACCAGCTTCCTGCGGCGGAAGTGGAAGTTCAAGAAGGAGCGGAACAAGGGCTACAAGC
ACCACGCCGAGGACGCCCTGATCATCGCCAACGCCGACTTCATCTTCAAGGAGTGGAAGAA
GCTGGACAAGGCCAAGAAGGTGATGGAGAACCAGATGTTCGAGGAGAAGCAGGCCGAGAGC
ATGCCCGAGATCGAGACCGAGCAGGAGTACAAGGAGATCTTCATCACCCCCCACCAGATCA
AGCACATCAAGGACTTCAAGGACTACAAGTACAGCCACCGGGTGGACAAGAAGCCCAACCG
GAAGCTGATCAACGACACCCTGTACAGCACCCGGAAGGACGACAAGGGCAACACCCTGATC
GTGAACAACCTGAACGGCCTGTACGACAAGGACAACGACAAGCTGAAGAAGCTGATCAACA
AGAGCCCCGAGAAGCTGCTGATGTACCACCACGACCCCCAGACCTACCAGAAGCTGAAGCT
GATCATGGAGCAGTACGGCGACGAGAAGAACCCCCTGTACAAGTACTACGAGGAGACCGGC
AACTACCTGACCAAGTACAGCAAGAAGGACAACGGCCCCGTGATCAAGAAGATCAAGTACT
ACGGCAACAAGCTGAACGCCCACCTGGACATCACCGACGACTACCCCAACAGCCGGAACAA
GGTGGTGAAGCTGAGCCTGAAGCCCTACCGGTTCGACGTGTACCTGGACAACGGCGTGTAC
AAGTTCGTGACCGTGAAGAACCTGGACGTGATCAAGAAGGAGAACTACTACGAGGTGAACA
GCAAGTGCTACGAGGAGGCCAAGAAGCTGAAGAAGATCAGCAACCAGGCCGAGTTCATCGC
CAGCTTCTACAAGAACGACCTGATCAAGATCAACGGCGAGCTGTACCGGGTGATCGGCGTG
AACAACGACCTGCTGAACCGGATCGAGGTGAACATGATCGACATCACCTACCGGGAGTACC
TGGAGAACATGAACGACAAGCGGCCCCCCCACATCATCAAGACCATCGCCAGCAAGACCCA
GAGCATCAAGAAGTACAGCACCGACATCCTGGGCAACCTGTACGAGGTGaaatccAAGAAG
CACCCCCAGATCATCAAGAAGGGCAAGCGGCCCGCCGCCACCAAGAAGGCCGGCCAGGCCA
AGAAGAAGAAGGCCCGGGACAGCAAGGTGGAGAACAAGACCAAGAAGCTGCGGGTGTTCGA
GGCCTTCGCCGGCATCGGCGCCCAGCGGAAGGCCCTGGAGAAGGTGCGGAAGGACGAGTAC
GAGATCGTGGGCCTGGCCGAGTGGTACGTGCCCGCCATCGTGATGTACCAGGCCATCCACA
ACAACTTCCACACCAAGCTGGAGTACAAGAGCGTGAGCCGGGAGGAGATGATCGACTACCT
GGAGAACAAGACCCTGAGCTGGAACAGCAAGAACCCCGTGAGCAACGGCTACTGGAAGCGG
AAGAAGGACGACGAGCTGAAGATCATCTACAACGCCATCAAGCTGAGCGAGAAGGAGGGCA
ACATCTTCGACATCCGGGACCTGTACAAGCGGACCCTGAAGAACATCGACCTGCTGACCTA
CAGCTTCCCCTGCCAGGACCTGAGCCAGCAGGGCATCCAGAAGGGCATGAAGCGGGGCAGC
GGCACCCGGAGCGGCCTGCTGTGGGAGATCGAGCGGGCCCTGGACAGCACCGAGAAGAACG
ACCTGCCCAAGTACCTGCTGATGGAGAACGTGGGCGCCCTGCTGCACAAGAAGAACGAGGA
GGAGCTGAACCAGTGGAAGCAGAAGCTGGAGAGCCTGGGCTACCAGAACAGCATCGAGGTG
CTGAACGCCGCCGACTTCGGCAGCAGCCAGGCCCGGCGGCGGGTGTTCATGATCAGCACCC
TGAACGAGTTCGTGGAGCTGCCCAAGGGCGACAAGAAGCCCAAGAGCATCAAGAAGGTGCT
GAACAAGATCGTGAGCGAGAAGGACATCCTGAACAACCTGCTGAAGTACAACCTGACCGAG
TTCAAGAAaACCAAGAGCAACATCAACAAGGCCAGCCTGATCGGCTACAGCAAGTTCAACA
GCGAGGGCTACGTGTACGACCCCGAGTTCACCGGCCCCACCCTGACCGCCAGCGGCGCCAA
CAGCCGGATCAAGATCAAGGACGGCAGCAACATCCGGAAGATGAACAGCGACGAGACCTTC
CTGTACATCGGCTTCGACAGCCAGGACGGCAAGCGGGTGAACGAGATCGAGTTCCTGACCG
AGAACCAGAAGATCTTCGTGTGCGGCAACAGCATCAGCGTGGAGGTGCTGGAGGCCATCAT
CGACAAGATCGGCGGCCCCAGCAGCGGCGGCAAGCGGCCCGCCGCCACCAAGAAGGCCGGC
CAGGCCAAGAAGAAGAAGGGCAGCTACCCCTACGACGTGCCCGACTACGCCTGAGggccgc
ttaattaagctgccttctgcggggcttgccttctggccatgcccttcttctctcccttgca
cctgtacctcttggtctttgaataaagcctgagtaggaagtctagaaaaaaaaaaaaaaaa
aaaaaaaaaaaaaaaaaaaaaaaaaaaaaaaaaaaaaaaaaaaaaaaaaaaaaaaaaaaaa
aaa

[0561] In some embodiments, an expression repressor comprises the amino acid sequence of SEQ ID NOs: 93, 33, 67, or 68. In some embodiments, an expression repressor described herein comprises an amino acid sequence of SEQ ID NO: 93, 33, 67, 68, or a sequence with at least 80, 85, 90, 95, 99, or 100% identity thereto, or having no more than 20, 19, 18, 17, 16, 15, 14, 13, 12, 11, 10, 9, 8, 7, 6, 5, 4, 3, 2, or 1 positions of difference thereto.

Sa-dCas9-MQ1 Protein sequence:
(SEQ ID NO: 93)
MAPKKKRKVGIHGVPAAAKRNYILGLAIGITSVGYGIIDYETRDVIDAGVRLFKEANVENNEGRR
SKRGARRLKRRRRHRIQRVKKLLFDYNLLTDHSELSGINPYEARVKGLSQKLSEEEFSAALLHLA
KRRGVHNVNEVEEDTGNELSTKEQISRNSKALEEKYVAELQLERLKKDGEVRGSINRFKTSDYVK
EAKQLLKVQKAYHQLDQSFIDTYIDLLETRRTYYEGPGEGSPFGWKDIKEWYEMLMGHCTYFPEE
LRSVKYAYNADLYNALNDLNNLVITRDENEKLEYYEKFQIIENVFKQKKKPTLKQIAKEILVNEE
DIKGYRVTSTGKPEFTNLKVYHDIKDITARKEIIENAELLDQIAKILTIYQSSEDIQEELTNLNS
ELTQEEIEQISNLKGYTGTHNLSLKAINLILDELWHTNDNQIAIFNRLKLVPKKVDLSQQKEIPT
TLVDDFILSPVVKRSFIQSIKVINAIIKKYGLPNDIIIELAREKNSKDAQKMINEMQKRNRQTNE
RIEEIIRTTGKENAKYLIEKIKLHDMQEGKCLYSLEAIPLEDLLNNPFNYEVDAIIPRSVSFDNS
FNNKVLVKQEENSKKGNRTPFQYLSSSDSKISYETFKKHILNLAKGKGRISKTKKEYLLEERDIN
RFSVQKDFINRNLVDTRYATRGLMNLLRSYFRVNNLDVKVKSINGGFTSFLRRKWKFKKERNKGY
KHHAEDALIIANADFIFKEWKKLDKAKKVMENQMFEEKQAESMPEIETEQEYKEIFITPHQIKHI
KDFKDYKYSHRVDKKPNRKLINDTLYSTRKDDKGNTLIVNNLNGLYDKDNDKLKKLINKSPEKLL
MYHHDPQTYQKLKLIMEQYGDEKNPLYKYYEETGNYLTKYSKKDNGPVIKKIKYYGNKLNAHLDI
TDDYPNSRNKVVKLSLKPYRFDVYLDNGVYKFVTVKNLDVIKKENYYEVNSKCYEEAKKLKKISN
QAEFIASFYKNDLIKINGELYRVIGVNNDLLNRIEVNMIDITYREYLENMNDKRPPHIIKTIASK
TQSIKKYSTDILGNLYEVKSKKHPQIIKKGKRPAATKKAGQAKKKKARDSKVENKTKKLRVFEAF
AGIGAQRKALEKVRKDEYEIVGLAEWYVPAIVMYQAIHNNFHTKLEYKSVSREEMIDYLENKTLS
WNSKNPVSNGYWKRKKDDELKIIYNAIKLSEKEGNIFDIRDLYKRTLKNIDLLTYSFPCQDLSQQ
GIQKGMKRGSGTRSGLLWEIERALDSTEKNDLPKYLLMENVGALLHKKNEEELNQWKQKLESLGY
QNSIEVLNAADFGSSQARRRVFMISTLNEFVELPKGDKKPKSIKKVLNKIVSEKDILNNLLKYNL
TEFKKTKSNINKASLIGYSKFNSEGYVYDPEFTGPTLTASGANSRIKIKDGSNIRKMNSDETFLY
IGFDSQDGKRVNEIEFLTENQKIFVCGNSISVEVLEAIIDKIGGPSSGGKRPAATKKAGQAKKKK
GSYPYDVPDYA
dCas9-MQ1 amino acid sequence
(SEQ ID NO: 33)
MAPKKKRKVGIHGVPAADKKYSIGLAIGTNSVGWAVITDEYKVPSKKFKVLGNTDRHSIKKNLIG
ALLFDSGETAEATRLKRTARRRYTRRKNRICYLQEIFSNEMAKVDDSFFHRLEESFLVEEDKKHE
RHPIFGNIVDEVAYHEKYPTIYHLRKKLVDSTDKADLRLIYLALAHMIKFRGHFLIEGDLNPDNS
DVDKLFIQLVQTYNQLFEENPINASGVDAKAILSARLSKSRRLENLIAQLPGEKKNGLFGNLIAL
SLGLTPNFKSNFDLAEDAKLQLSKDTYDDDLDNLLAQIGDQYADLFLAAKNLSDAILLSDILRVN
TEITKAPLSASMIKRYDEHHQDLTLLKALVRQQLPEKYKEIFFDQSKNGYAGYIDGGASQEEFYK
FIKPILEKMDGTEELLVKLNREDLLRKQRTFDNGSIPHQIHLGELHAILRRQEDFYPFLKDNREK
IEKILTFRIPYYVGPLARGNSRFAWMTRKSEETITPWNFEEVVDKGASAQSFIERMTNFDKNLPN
EKVLPKHSLLYEYFTVYNELTKVKYVTEGMRKPAFLSGEQKKAIVDLLFKTNRKVTVKQLKEDYF
KKIECFDSVEISGVEDRFNASLGTYHDLLKIIKDKDFLDNEENEDILEDIVLTLTLFEDREMIEE
RLKTYAHLFDDKVMKQLKRRRYTGWGRLSRKLINGIRDKQSGKTILDFLKSDGFANRNFMQLIHD
DSLTFKEDIQKAQVSGQGDSLHEHIANLAGSPAIKKGILQTVKVVDELVKVMGRHKPENIVIEMA
RENQTTQKGQKNSRERMKRIEEGIKELGSQILKEHPVENTQLQNEKLYLYYLQNGRDMYVDQELD
INRLSDYDVAAIVPQSFLKDDSIDNKVLTRSDKARGKSDNVPSEEVVKKMKNYWRQLLNAKLITQ
RKFDNLTKAERGGLSELDKAGFIKRQLVETRQITKHVAQILDSRMNTKYDENDKLIREVKVITLK
SKLVSDFRKDFQFYKVREINNYHHAHDAYLNAVVGTALIKKYPKLESEFVYGDYKVYDVRKMIAK
SEQEIGKATAKYFFYSNIMNFFKTEITLANGEIRKRPLIETNGETGEIVWDKGRDFATVRKVLSM
PQVNIVKKTEVQTGGFSKESILPKRNSDKLIARKKDWDPKKYGGFDSPTVAYSVLVVAKVEKGKS
KKLKSVKELLGITIMERSSFEKNPIDFLEAKGYKEVKKDLIIKLPKYSLFELENGRKRMLASAGE
LQKGNELALPSKYVNFLYLASHYEKLKGSPEDNEQKQLFVEQHKHYLDEIIEQISEFSKRVILAD
ANLDKVLSAYNKHRDKPIREQAENIIHLFTLTNLGAPAAFKYFDTTIDRKRYTSTKEVLDATLIH
QSITGLYETRIDLSQLGGDKRPAATKKAGQAKKKKARDSKVENKTKKLRVFEAFAGIGAQRKALE
KVRKDEYEIVGLAEWYVPAIVMYQAIHNNFHTKLEYKSVSREEMIDYLENKTLSWNSKNPVSNGY
WKRKKDDELKIIYNAIKLSEKEGNIFDIRDLYKRTLKNIDLLTYSFPCQDLSQQGIQKGMKRGSG
TRSGLLWEIERALDSTEKNDLPKYLLMENVGALLHKKNEEELNQWKQKLESLGYQNSIEVLNAAD
FGSSQARRRVFMISTLNEFVELPKGDKKPKSIKKVLNKIVSEKDILNNLLKYNLTEFKKTKSNIN
KASLIGYSKFNSEGYVYDPEFTGPTLTASGANSRIKIKDGSNIRKMNSDETFLYIGFDSQDGKRV
NEIEFLTENQKIFVCGNSISVEVLEAIIDKIGGPSSGGKRPAATKKAGQAKKKKGSYPYDVPDYA
Sa-dCas9-MQ1 without HA tag
(SEQ ID NO: 67)
MAPKKKRKVGIHGVPAAAKRNYILGLAIGITSVGYGIIDYETRDVIDAGVRLFKEANVENNEGRR
SKRGARRLKRRRRHRIQRVKKLLFDYNLLTDHSELSGINPYEARVKGLSQKLSEEEFSAALLHLA
KRRGVHNVNEVEEDTGNELSTKEQISRNSKALEEKYVAELQLERLKKDGEVRGSINRFKTSDYVK
EAKQLLKVQKAYHQLDQSFIDTYIDLLETRRTYYEGPGEGSPFGWKDIKEWYEMLMGHCTYFPEE
LRSVKYAYNADLYNALNDLNNLVITRDENEKLEYYEKFQIIENVFKQKKKPTLKQIAKEILVNEE
DIKGYRVTSTGKPEFTNLKVYHDIKDITARKEIIENAELLDQIAKILTIYQSSEDIQEELTNLNS
ELTQEEIEQISNLKGYTGTHNLSLKAINLILDELWHTNDNQIAIFNRLKLVPKKVDLSQQKEIPT
TLVDDFILSPVVKRSFIQSIKVINAIIKKYGLPNDIIIELAREKNSKDAQKMINEMQKRNRQTNE
RIEEIIRTTGKENAKYLIEKIKLHDMQEGKCLYSLEAIPLEDLLNNPFNYEVDAIIPRSVSFDNS
FNNKVLVKQEENSKKGNRTPFQYLSSSDSKISYETFKKHILNLAKGKGRISKTKKEYLLEERDIN
RFSVQKDFINRNLVDTRYATRGLMNLLRSYFRVNNLDVKVKSINGGFTSFLRRKWKFKKERNKGY
KHHAEDALIIANADFIFKEWKKLDKAKKVMENQMFEEKQAESMPEIETEQEYKEIFITPHQIKHI
KDFKDYKYSHRVDKKPNRKLINDTLYSTRKDDKGNTLIVNNLNGLYDKDNDKLKKLINKSPEKLL
MYHHDPQTYQKLKLIMEQYGDEKNPLYKYYEETGNYLTKYSKKDNGPVIKKIKYYGNKLNAHLDI
TDDYPNSRNKVVKLSLKPYRFDVYLDNGVYKFVTVKNLDVIKKENYYEVNSKCYEEAKKLKKISN
QAEFIASFYKNDLIKINGELYRVIGVNNDLLNRIEVNMIDITYREYLENMNDKRPPHIIKTIASK
TQSIKKYSTDILGNLYEVKSKKHPQIIKKGKRPAATKKAGQAKKKKARDSKVENKTKKLRVFEAF
AGIGAQRKALEKVRKDEYEIVGLAEWYVPAIVMYQAIHNNFHTKLEYKSVSREEMIDYLENKTLS
WNSKNPVSNGYWKRKKDDELKIIYNAIKLSEKEGNIFDIRDLYKRTLKNIDLLTYSFPCQDLSQQ
GIQKGMKRGSGTRSGLLWEIERALDSTEKNDLPKYLLMENVGALLHKKNEEELNQWKQKLESLGY
QNSIEVLNAADFGSSQARRRVFMISTLNEFVELPKGDKKPKSIKKVLNKIVSEKDILNNLLKYNL
TEFKKTKSNINKASLIGYSKFNSEGYVYDPEFTGPTLTASGANSRIKIKDGSNIRKMNSDETFLY
IGFDSQDGKRVNEIEFLTENQKIFVCGNSISVEVLEAIIDKIGGPSSGGKRPAATKKAGQAKKKK
GS
dCas9-MQ1 without HA tag
(SEQ ID NO: 68)
MAPKKKRKVGIHGVPAADKKYSIGLAIGTNSVGWAVITDEYKVPSKKFKVLGNTDRHSIKKNLIG
ALLFDSGETAEATRLKRTARRRYTRRKNRICYLQEIFSNEMAKVDDSFFHRLEESFLVEEDKKHE
RHPIFGNIVDEVAYHEKYPTIYHLRKKLVDSTDKADLRLIYLALAHMIKFRGHFLIEGDLNPDNS
DVDKLFIQLVQTYNQLFEENPINASGVDAKAILSARLSKSRRLENLIAQLPGEKKNGLFGNLIAL
SLGLTPNFKSNFDLAEDAKLQLSKDTYDDDLDNLLAQIGDQYADLFLAAKNLSDAILLSDILRVN
TEITKAPLSASMIKRYDEHHQDLTLLKALVRQQLPEKYKEIFFDQSKNGYAGYIDGGASQEEFYK
FIKPILEKMDGTEELLVKLNREDLLRKQRTFDNGSIPHQIHLGELHAILRRQEDFYPFLKDNREK
IEKILTFRIPYYVGPLARGNSRFAWMTRKSEETITPWNFEEVVDKGASAQSFIERMTNFDKNLPN
EKVLPKHSLLYEYFTVYNELTKVKYVTEGMRKPAFLSGEQKKAIVDLLFKTNRKVTVKQLKEDYF
KKIECFDSVEISGVEDRFNASLGTYHDLLKIIKDKDFLDNEENEDILEDIVLTLTLFEDREMIEE
RLKTYAHLFDDKVMKQLKRRRYTGWGRLSRKLINGIRDKQSGKTILDFLKSDGFANRNFMQLIHD
DSLTFKEDIQKAQVSGQGDSLHEHIANLAGSPAIKKGILQTVKVVDELVKVMGRHKPENIVIEMA
RENQTTQKGQKNSRERMKRIEEGIKELGSQILKEHPVENTQLQNEKLYLYYLQNGRDMYVDQELD
INRLSDYDVAAIVPQSFLKDDSIDNKVLTRSDKARGKSDNVPSEEVVKKMKNYWRQLLNAKLITQ
RKFDNLTKAERGGLSELDKAGFIKRQLVETRQITKHVAQILDSRMNTKYDENDKLIREVKVITLK
SKLVSDFRKDFQFYKVREINNYHHAHDAYLNAVVGTALIKKYPKLESEFVYGDYKVYDVRKMIAK
SEQEIGKATAKYFFYSNIMNFFKTEITLANGEIRKRPLIETNGETGEIVWDKGRDFATVRKVLSM
PQVNIVKKTEVQTGGFSKESILPKRNSDKLIARKKDWDPKKYGGFDSPTVAYSVLVVAKVEKGKS
KKLKSVKELLGITIMERSSFEKNPIDFLEAKGYKEVKKDLIIKLPKYSLFELENGRKRMLASAGE
LQKGNELALPSKYVNFLYLASHYEKLKGSPEDNEQKQLFVEQHKHYLDEIIEQISEFSKRVILAD
ANLDKVLSAYNKHRDKPIREQAENIIHLFTLTNLGAPAAFKYFDTTIDRKRYTSTKEVLDATLIH
QSITGLYETRIDLSQLGGDKRPAATKKAGQAKKKKARDSKVENKTKKLRVFEAFAGIGAQRKALE
KVRKDEYEIVGLAEWYVPAIVMYQAIHNNFHTKLEYKSVSREEMIDYLENKTLSWNSKNPVSNGY
WKRKKDDELKIIYNAIKLSEKEGNIFDIRDLYKRTLKNIDLLTYSFPCQDLSQQGIQKGMKRGSG
TRSGLLWEIERALDSTEKNDLPKYLLMENVGALLHKKNEEELNQWKQKLESLGYQNSIEVLNAAD
FGSSQARRRVFMISTLNEFVELPKGDKKPKSIKKVLNKIVSEKDILNNLLKYNLTEFKKTKSNIN
KASLIGYSKFNSEGYVYDPEFTGPTLTASGANSRIKIKDGSNIRKMNSDETFLYIGFDSQDGKRV
NEIEFLTENQKIFVCGNSISVEVLEAIIDKIGGPSSGGKRPAATKKAGQAKKKKGS

[0562] In some embodiments, an expression repressor comprises a DNA-targeting moiety comprising dCas9, e.g., an S. pyogenes dCas9, and a repressor domain comprising KRAB, e.g., a KRAB domain. In some embodiments, the expression repressor is encoded by the nucleic acid sequence of SEQ ID NOs: 94 (e.g., a plasmid encoding the expression repressor) and/or 95 (e.g., a nucleic acid (e.g., cDNA) encoding the expression repressor). In some embodiments, a nucleic acid described herein comprises a nucleic acid sequence of SEQ ID NO: 94 or 95 or a sequence with at least 80, 85, 90, 95, 99, or 100% identity thereto, or having no more than 20, 19, 18, 17, 16, 15, 14, 13, 12, 11, 10, 9, 8, 7, 6, 5, 4, 3, 2, or 1 positions of difference thereto.

Sp-dCas9-KRAB (PL-27687) Plasmid DNA sequence:
(SEQ ID NO: 94)
TCGCGCGTTTCGGTGATGACGGTGAAAACCTCTGACACATGCAGCTCCCGGAGACGGTCACA
GCTTGTCTGTAAGCGGATGCCGGGAGCAGACAAGCCCGTCAGGGCGCGTCAGCGGGTGTTGG
CGGGTGTCGGGGCTGGCTTAACTATGCGGCATCAGAGCAGATTGTACTGAGAGTGCACCATA
TGCGGTGTGAAATACCGCACAGATGCGTAAGGAGAAAATACCGCATCAGGCGCCATTCGCCA
TTCAGGCTGCGCAACTGTTGGGAAGGGCGATCGGTGCGGGCCTCTTCGCTATTACGCCAGCT
GGCGAAAGGGGGATGTGCTGCAAGGCGATTAAGTTGGGTAACGCCAGGGTTTTCCCAGTCAC
GACGTTGTAAAACGACGGCCAGTGAATTGACGCGTATTGGGATGGTACCTAATACGACTCAC
TATAAGGAAATAAGAGAGAAAAGAAGAGTAAGAAGAAATATAAGAGCCACCATGGCCCCCAA
GAAGAAGCGGAAGGTGGGCATCCACGGCGTGCCCGCCGCCGACAAGAAGTACAGCATCGGCC
TGGCCATCGGCACCAACAGCGTGGGCTGGGCCGTGATCACCGACGAGTACAAGGTGCCCAGC
AAGAAGTTCAAGGTGCTGGGCAACACCGACCGGCACAGCATCAAGAAGAACCTGATCGGCGC
CCTGCTGTTCGACAGCGGCGAGACCGCCGAGGCCACCCGGCTGAAGCGGACCGCCCGGCGGC
GGTACACCCGGCGGAAGAACCGGATCTGCTACCTGCAGGAGATCTTCAGCAACGAGATGGCC
AAGGTGGACGACAGCTTCTTCCACCGGCTGGAGGAGAGCTTCCTGGTGGAGGAGGACAAGAA
GCACGAGCGGCACCCCATCTTCGGCAACATCGTGGACGAGGTGGCCTACCACGAGAAGTACC
CCACCATCTACCACCTGCGGAAGAAGCTGGTGGACAGCACCGACAAGGCCGACCTGCGGCTG
ATCTACCTGGCCCTGGCCCACATGATCAAGTTCCGGGGCCACTTCCTGATCGAGGGCGACCT
GAACCCCGACAACAGCGACGTGGACAAGCTGTTCATCCAGCTGGTGCAGACCTACAACCAGC
TGTTCGAGGAGAACCCCATCAACGCCAGCGGCGTGGACGCCAAGGCCATCCTGAGCGCCCGG
CTGAGCAAGAGCCGGCGGCTGGAGAACCTGATCGCCCAGCTGCCCGGCGAGAAGAAGAACGG
CCTGTTCGGCAACCTGATCGCCCTGAGCCTGGGCCTGACCCCCAACTTCAAGAGCAACTTCG
ACCTGGCCGAGGACGCCAAGCTGCAGCTGAGCAAGGACACCTACGACGACGACCTGGACAAC
CTGCTGGCCCAGATCGGCGACCAGTACGCCGACCTGTTCCTGGCCGCCAAGAACCTGAGCGA
CGCCATCCTGCTGAGCGACATCCTGCGGGTGAACACCGAGATCACCAAGGCCCCCCTGAGCG
CCAGCATGATCAAGCGGTACGACGAGCACCACCAGGACCTGACCCTGCTGAAGGCCCTGGTG
CGGCAGCAGCTGCCCGAGAAGTACAAGGAGATCTTCTTCGACCAGAGCAAGAACGGCTACGC
CGGCTACATCGACGGCGGCGCCAGCCAGGAGGAGTTCTACAAGTTCATCAAGCCCATCCTGG
AGAAGATGGACGGCACCGAGGAGCTGCTGGTGAAGCTGAACCGGGAGGACCTGCTGCGGAAG
CAGCGGACCTTCGACAACGGCAGCATCCCCCACCAGATCCACCTGGGCGAGCTGCACGCCAT
CCTGCGGCGGCAGGAGGACTTCTACCCCTTCCTGAAGGACAACCGGGAGAAGATCGAGAAGA
TCCTGACCTTCCGGATCCCCTACTACGTGGGCCCCCTGGCCCGGGGCAACAGCCGGTTCGCC
TGGATGACCCGGaaatccGAGGAGACCATCACCCCCTGGAACTTCGAGGAGGTGGTGGACAA
GGGCGCCAGCGCCCAGAGCTTCATCGAGCGGATGACCAACTTCGACAAGAACCTGCCCAACG
AGAAGGTGCTGCCCAAGCACAGCCTGCTGTACGAGTACTTCACCGTGTACAACGAGCTGACC
AAGGTGAAGTACGTGACCGAGGGCATGCGGAAGCCCGCCTTCCTGAGCGGCGAGCAGAAGAA
GGCCATCGTGGACCTGCTGTTCAAGACCAACCGGAAGGTGACCGTGAAGCAGCTGAAGGAGG
ACTACTTCAAGAAGATCGAGTGCTTCGACAGCGTGGAGATCAGCGGCGTGGAGGACCGGTTC
AACGCCAGCCTGGGCACCTACCACGACCTGCTGAAGATCATCAAGGACAAGGACTTCCTGGA
CAACGAGGAGAACGAGGACATCCTGGAGGACATCGTGCTGACCCTGACCCTGTTCGAGGACC
GGGAGATGATCGAGGAGCGGCTGAAaACCTACGCCCACCTGTTCGACGACAAGGTGATGAAG
CAGCTGAAGCGGCGGCGGTACACCGGCTGGGGCCGGCTGAGCCGGAAGCTGATCAACGGCAT
CCGGGACAAGCAGAGCGGCAAGACCATCCTGGACTTCCTGaaatccGACGGCTTCGCCAACC
GGAACTTCATGCAGCTGATCCACGACGACAGCCTGACCTTCAAGGAGGACATCCAGAAGGCC
CAGGTGAGCGGCCAGGGCGACAGCCTGCACGAGCACATCGCCAACCTGGCCGGCAGCCCCGC
CATCAAGAAGGGCATCCTGCAGACCGTGAAGGTGGTGGACGAGCTGGTGAAGGTGATGGGCC
GGCACAAGCCCGAGAACATCGTGATCGAGATGGCCCGGGAGAACCAGACCACCCAGAAGGGC
CAGAAGAACAGCCGGGAGCGGATGAAGCGGATCGAGGAGGGCATCAAGGAGCTGGGCAGCCA
GATCCTGAAGGAGCACCCCGTGGAGAACACCCAGCTGCAGAACGAGAAGCTGTACCTGTACT
ACCTGCAGAACGGCCGGGACATGTACGTGGACCAGGAGCTGGACATCAACCGGCTGAGCGAC
TACGACGTGGCCGCCATCGTGCCCCAGAGCTTCCTGAAGGACGACAGCATCGACAACAAGGT
GCTGACCCGGAGCGACAAGGCCCGGGGCAAGAGCGACAACGTGCCCAGCGAGGAGGTGGTGA
AGAAGATGAAGAACTACTGGCGGCAGCTGCTGAACGCCAAGCTGATCACCCAGCGGAAGTTC
GACAACCTGACCAAGGCCGAGCGGGGCGGCCTGAGCGAGCTGGACAAGGCCGGCTTCATCAA
GCGGCAGCTGGTGGAGACCCGGCAGATCACCAAGCACGTGGCCCAGATCCTGGACAGCCGGA
TGAACACCAAGTACGACGAGAACGACAAGCTGATCCGGGAGGTGAAGGTGATCACCCTGaaa
tccAAGCTGGTGAGCGACTTCCGGAAGGACTTCCAGTTCTACAAGGTGCGGGAGATCAACAA
CTACCACCACGCCCACGACGCCTACCTGAACGCCGTGGTGGGCACCGCCCTGATCAAGAAGT
ACCCCAAGCTGGAGAGCGAGTTCGTGTACGGCGACTACAAGGTGTACGACGTGCGGAAGATG
ATCGCCAAGAGCGAGCAGGAGATCGGCAAGGCCACCGCCAAGTACTTCTTCTACAGCAACAT
CATGAACTTCTTCAAGACCGAGATCACCCTGGCCAACGGCGAGATCCGGAAGCGGCCCCTGA
TCGAGACCAACGGCGAGACCGGCGAGATCGTGTGGGACAAGGGCCGGGACTTCGCCACCGTG
CGGAAGGTGCTGAGCATGCCCCAGGTGAACATCGTGAAGAAaACCGAGGTGCAGACCGGCGG
CTTCAGCAAGGAGAGCATCCTGCCCAAGCGGAACAGCGACAAGCTGATCGCCCGGAAGAAGG
ACTGGGACCCCAAGAAGTACGGCGGCTTCGACAGCCCCACCGTGGCCTACAGCGTGCTGGTG
GTGGCCAAGGTGGAGAAGGGCAAGAGCAAGAAGCTGaaatccGTGAAGGAGCTGCTGGGCAT
CACCATCATGGAGCGGAGCAGCTTCGAGAAGAACCCCATCGACTTCCTGGAGGCCAAGGGCT
ACAAGGAGGTGAAGAAGGACCTGATCATCAAGCTGCCCAAGTACAGCCTGTTCGAGCTGGAG
AACGGCCGGAAGCGGATGCTGGCCAGCGCCGGCGAGCTGCAGAAGGGCAACGAGCTGGCCCT
GCCCAGCAAGTACGTGAACTTCCTGTACCTGGCCAGCCACTACGAGAAGCTGAAGGGCAGCC
CCGAGGACAACGAGCAGAAGCAGCTGTTCGTGGAGCAGCACAAGCACTACCTGGACGAGATC
ATCGAGCAGATCAGCGAGTTCAGCAAGCGGGTGATCCTGGCCGACGCCAACCTGGACAAGGT
GCTGAGCGCCTACAACAAGCACCGGGACAAGCCCATCCGGGAGCAGGCCGAGAACATCATCC
ACCTGTTCACCCTGACCAACCTGGGCGCCCCCGCCGCCTTCAAGTACTTCGACACCACCATC
GACCGGAAGCGGTACACCAGCACCAAGGAGGTGCTGGACGCCACCCTGATCCACCAGAGCAT
CACCGGCCTGTACGAGACCCGGATCGACCTGAGCCAGCTGGGCGGCGACAAGCGGCCCGCCG
CCACCAAGAAGGCCGGCCAGGCCAAGAAGAAGAAGGCCAGCGACGCCAAGAGCCTGACCGCC
TGGAGCCGGACCCTGGTGACCTTCAAGGACGTGTTCGTGGACTTCACCCGGGAGGAGTGGAA
GCTGCTGGACACCGCCCAGCAGATCCTGTACCGGAACGTGATGCTGGAGAACTACAAGAACC
TGGTGAGCCTGGGCTACCAGCTGACCAAGCCCGACGTGATCCTGCGGCTGGAGAAGGGCGAG
GAGCCCTGGCTGGTGGAGCGGGAGATCCACCAGGAGACCCACCCCGACAGCGAGACCGCCTT
CGAGATCAAGAGCAGCGTGAGCGGCGGCAAGCGGCCCGCCGCCACCAAGAAGGCCGGCCAGG
CCAAGAAGAAGAAGGGCAGCTACCCCTACGACGTGCCCGACTACGCCTGAGcggccgcttaa
ttaagctgccttctgcggggcttgccttctggccatgcccttcttctctcccttgcacctgt
acctcttggtctttgaataaagcctgagtaggaagtctagaaaaaaaaaaaaaaaaaaaaaa
aaaaaaaaaaaaaaaaaaaaaaaaaaaaaaaaaaaaaaaaaaaaaaaaaaaaaaaaaattgt
cttcttcatcgcctgcagATCCCAATGGCGCGCCGAGCTTGGCTCGAGCATGGTCATAGCTG
TTTCCTGTGTGAAATTGTTATCCGCTCACAATTCCACACAACATACGAGCCGGAAGCATAAA
GTGTAAAGCCTGGGGTGCCTAATGAGTGAGCTAACTCACATTAATTGCGTTGCGCTCACTGC
CCGCTTTCCAGTCGGGAAACCTGTCGTGCCAGCTGCATTAATGAATCGGCCAACGCGCGGGG
AGAGGCGGTTTGCGTATTGGGCGCTCTTCCGCTTCCTCGCTCACTGACTCGCTGCGCTCGGT
CGTTCGGCTGCGGCGAGCGGTATCAGCTCACTCAAAGGCGGTAATACGGTTATCCACAGAAT
CAGGGGATAACGCAGGAAAGAACATGTGAGCAAAAGGCCAGCAAAAGGCCAGGAACCGTAAA
AAGGCCGCGTTGCTGGCGTTTTTCCATAGGCTCCGCCCCCCTGACGAGCATCACAAAAATCG
ACGCTCAAGTCAGAGGTGGCGAAACCCGACAGGACTATAAAGATACCAGGCGTTTCCCCCTG
GAAGCTCCCTCGTGCGCTCTCCTGTTCCGACCCTGCCGCTTACCGGATACCTGTCCGCCTTT
CTCCCTTCGGGAAGCGTGGCGCTTTCTCATAGCTCACGCTGTAGGTATCTCAGTTCGGTGTA
GGTCGTTCGCTCCAAGCTGGGCTGTGTGCACGAACCCCCCGTTCAGCCCGACCGCTGCGCCT
TATCCGGTAACTATCGTCTTGAGTCCAACCCGGTAAGACACGACTTATCGCCACTGGCAGCA
GCCACTGGTAACAGGATTAGCAGAGCGAGGTATGTAGGCGGTGCTACAGAGTTCTTGAAGTG
GTGGCCTAACTACGGCTACACTAGAAGAACAGTATTTGGTATCTGCGCTCTGCTGAAGCCAG
TTACCTTCGGAAAAAGAGTTGGTAGCTCTTGATCCGGCAAACAAACCACCGCTGGTAGCGGT
GGTTTTTTTGTTTGCAAGCAGCAGATTACGCGCAGAAAAAAAGGATCTCAAGAAGATCCTTT
GATCTTTTCTACGGGGTCTGACGCTCAGTGGAACGAAAACTCACGTTAAGGGATTTTGGTCA
TGAGATTATCAAAAAGGATCTTCACCTAGATCCTTTTAAATTAAAAATGAAGTTTTAAATCA
ATCTAAAGTATATATGAGTAAACTTGGTCTGACAGTTAGAAAAACTCATCGAGCATCAAATG
AAACTGCAATTTATTCATATCAGGATTATCAATACCATATTTTTGAAAAAGCCGTTTCTGTA
ATGAAGGAGAAAACTCACCGAGGCAGTTCCATAGGATGGCAAGATCCTGGTATCGGTCTGCG
ATTCCGACTCGTCCAACATCAATACAACCTATTAATTTCCCCTCGTCAAAAATAAGGTTATC
AAGTGAGAAATCACCATGAGTGACGACTGAATCCGGTGAGAATGGCAAAAGTTTATGCATTT
CTTTCCAGACTTGTTCAACAGGCCAGCCATTACGCTCGTCATCAAAATCACTCGCATCAACC
AAACCGTTATTCATTCGTGATTGCGCCTGAGCGAGACGAAATACGCGATCGCTGTTAAAAGG
ACAATTACAAACAGGAATCGAATGCAACCGGCGCAGGAACACTGCCAGCGCATCAACAATAT
TTTCACCTGAATCAGGATATTCTTCTAATACCTGGAATGCTGTTTTCCCAGGGATCGCAGTG
GTGAGTAACCATGCATCATCAGGAGTACGGATAAAATGCTTGATGGTCGGAAGAGGCATAAA
TTCCGTCAGCCAGTTTAGTCTGACCATCTCATCTGTAACATCATTGGCAACGCTACCTTTGC
CATGTTTCAGAAACAACTCTGGCGCATCGGGCTTCCCATACAATCGATAGATTGTCGCACCT
GATTGCCCGACATTATCGCGAGCCCATTTATACCCATATAAATCAGCATCCATGTTGGAATT
TAATCGCGGCCTAGAGCAAGACGTTTCCCGTTGAATATGGCTCATACTCTTCCTTTTTCAAT
ATTATTGAAGCATTTATCAGGGTTATTGTCTCATGAGCGGATACATATTTGAATGTATTTAG
AAAAATAAACAAATAGGGGTTCCGCGCACATTTCCCCGAAAAGTGCCACCTGACGTCTAAGA
AACCATTATTATCATGACATTAACCTATAAAAATAGGCGTATCACGAGGCCCTTTCGTC
Sp-dCas9-KRAB (MR-28122) Expressed mRNA sequence:
(SEQ ID NO: 95)
AGGAAATAAGAGAGAAAAGAAGAGTAAGAAGAAATATAAGAGCCACCATGGCCCCCAAGAAG
AAGCGGAAGGTGGGCATCCACGGCGTGCCCGCCGCCGACAAGAAGTACAGCATCGGCCTGGC
CATCGGCACCAACAGCGTGGGCTGGGCCGTGATCACCGACGAGTACAAGGTGCCCAGCAAGA
AGTTCAAGGTGCTGGGCAACACCGACCGGCACAGCATCAAGAAGAACCTGATCGGCGCCCTG
CTGTTCGACAGCGGCGAGACCGCCGAGGCCACCCGGCTGAAGCGGACCGCCCGGCGGCGGTA
CACCCGGCGGAAGAACCGGATCTGCTACCTGCAGGAGATCTTCAGCAACGAGATGGCCAAGG
TGGACGACAGCTTCTTCCACCGGCTGGAGGAGAGCTTCCTGGTGGAGGAGGACAAGAAGCAC
GAGCGGCACCCCATCTTCGGCAACATCGTGGACGAGGTGGCCTACCACGAGAAGTACCCCAC
CATCTACCACCTGCGGAAGAAGCTGGTGGACAGCACCGACAAGGCCGACCTGCGGCTGATCT
ACCTGGCCCTGGCCCACATGATCAAGTTCCGGGGCCACTTCCTGATCGAGGGCGACCTGAAC
CCCGACAACAGCGACGTGGACAAGCTGTTCATCCAGCTGGTGCAGACCTACAACCAGCTGTT
CGAGGAGAACCCCATCAACGCCAGCGGCGTGGACGCCAAGGCCATCCTGAGCGCCCGGCTGA
GCAAGAGCCGGCGGCTGGAGAACCTGATCGCCCAGCTGCCCGGCGAGAAGAAGAACGGCCTG
TTCGGCAACCTGATCGCCCTGAGCCTGGGCCTGACCCCCAACTTCAAGAGCAACTTCGACCT
GGCCGAGGACGCCAAGCTGCAGCTGAGCAAGGACACCTACGACGACGACCTGGACAACCTGC
TGGCCCAGATCGGCGACCAGTACGCCGACCTGTTCCTGGCCGCCAAGAACCTGAGCGACGCC
ATCCTGCTGAGCGACATCCTGCGGGTGAACACCGAGATCACCAAGGCCCCCCTGAGCGCCAG
CATGATCAAGCGGTACGACGAGCACCACCAGGACCTGACCCTGCTGAAGGCCCTGGTGCGGC
AGCAGCTGCCCGAGAAGTACAAGGAGATCTTCTTCGACCAGAGCAAGAACGGCTACGCCGGC
TACATCGACGGCGGCGCCAGCCAGGAGGAGTTCTACAAGTTCATCAAGCCCATCCTGGAGAA
GATGGACGGCACCGAGGAGCTGCTGGTGAAGCTGAACCGGGAGGACCTGCTGCGGAAGCAGC
GGACCTTCGACAACGGCAGCATCCCCCACCAGATCCACCTGGGCGAGCTGCACGCCATCCTG
CGGCGGCAGGAGGACTTCTACCCCTTCCTGAAGGACAACCGGGAGAAGATCGAGAAGATCCT
GACCTTCCGGATCCCCTACTACGTGGGCCCCCTGGCCCGGGGCAACAGCCGGTTCGCCTGGA
TGACCCGGaaatccGAGGAGACCATCACCCCCTGGAACTTCGAGGAGGTGGTGGACAAGGGC
GCCAGCGCCCAGAGCTTCATCGAGCGGATGACCAACTTCGACAAGAACCTGCCCAACGAGAA
GGTGCTGCCCAAGCACAGCCTGCTGTACGAGTACTTCACCGTGTACAACGAGCTGACCAAGG
TGAAGTACGTGACCGAGGGCATGCGGAAGCCCGCCTTCCTGAGCGGCGAGCAGAAGAAGGCC
ATCGTGGACCTGCTGTTCAAGACCAACCGGAAGGTGACCGTGAAGCAGCTGAAGGAGGACTA
CTTCAAGAAGATCGAGTGCTTCGACAGCGTGGAGATCAGCGGCGTGGAGGACCGGTTCAACG
CCAGCCTGGGCACCTACCACGACCTGCTGAAGATCATCAAGGACAAGGACTTCCTGGACAAC
GAGGAGAACGAGGACATCCTGGAGGACATCGTGCTGACCCTGACCCTGTTCGAGGACCGGGA
GATGATCGAGGAGCGGCTGAAaACCTACGCCCACCTGTTCGACGACAAGGTGATGAAGCAGC
TGAAGCGGCGGCGGTACACCGGCTGGGGCCGGCTGAGCCGGAAGCTGATCAACGGCATCCGG
GACAAGCAGAGCGGCAAGACCATCCTGGACTTCCTGaaatccGACGGCTTCGCCAACCGGAA
CTTCATGCAGCTGATCCACGACGACAGCCTGACCTTCAAGGAGGACATCCAGAAGGCCCAGG
TGAGCGGCCAGGGCGACAGCCTGCACGAGCACATCGCCAACCTGGCCGGCAGCCCCGCCATC
AAGAAGGGCATCCTGCAGACCGTGAAGGTGGTGGACGAGCTGGTGAAGGTGATGGGCCGGCA
CAAGCCCGAGAACATCGTGATCGAGATGGCCCGGGAGAACCAGACCACCCAGAAGGGCCAGA
AGAACAGCCGGGAGCGGATGAAGCGGATCGAGGAGGGCATCAAGGAGCTGGGCAGCCAGATC
CTGAAGGAGCACCCCGTGGAGAACACCCAGCTGCAGAACGAGAAGCTGTACCTGTACTACCT
GCAGAACGGCCGGGACATGTACGTGGACCAGGAGCTGGACATCAACCGGCTGAGCGACTACG
ACGTGGCCGCCATCGTGCCCCAGAGCTTCCTGAAGGACGACAGCATCGACAACAAGGTGCTG
ACCCGGAGCGACAAGGCCCGGGGCAAGAGCGACAACGTGCCCAGCGAGGAGGTGGTGAAGAA
GATGAAGAACTACTGGCGGCAGCTGCTGAACGCCAAGCTGATCACCCAGCGGAAGTTCGACA
ACCTGACCAAGGCCGAGCGGGGCGGCCTGAGCGAGCTGGACAAGGCCGGCTTCATCAAGCGG
CAGCTGGTGGAGACCCGGCAGATCACCAAGCACGTGGCCCAGATCCTGGACAGCCGGATGAA
CACCAAGTACGACGAGAACGACAAGCTGATCCGGGAGGTGAAGGTGATCACCCTGaaatccA
AGCTGGTGAGCGACTTCCGGAAGGACTTCCAGTTCTACAAGGTGCGGGAGATCAACAACTAC
CACCACGCCCACGACGCCTACCTGAACGCCGTGGTGGGCACCGCCCTGATCAAGAAGTACCC
CAAGCTGGAGAGCGAGTTCGTGTACGGCGACTACAAGGTGTACGACGTGCGGAAGATGATCG
CCAAGAGCGAGCAGGAGATCGGCAAGGCCACCGCCAAGTACTTCTTCTACAGCAACATCATG
AACTTCTTCAAGACCGAGATCACCCTGGCCAACGGCGAGATCCGGAAGCGGCCCCTGATCGA
GACCAACGGCGAGACCGGCGAGATCGTGTGGGACAAGGGCCGGGACTTCGCCACCGTGCGGA
AGGTGCTGAGCATGCCCCAGGTGAACATCGTGAAGAAaACCGAGGTGCAGACCGGCGGCTTC
AGCAAGGAGAGCATCCTGCCCAAGCGGAACAGCGACAAGCTGATCGCCCGGAAGAAGGACTG
GGACCCCAAGAAGTACGGCGGCTTCGACAGCCCCACCGTGGCCTACAGCGTGCTGGTGGTGG
CCAAGGTGGAGAAGGGCAAGAGCAAGAAGCTGaaatccGTGAAGGAGCTGCTGGGCATCACC
ATCATGGAGCGGAGCAGCTTCGAGAAGAACCCCATCGACTTCCTGGAGGCCAAGGGCTACAA
GGAGGTGAAGAAGGACCTGATCATCAAGCTGCCCAAGTACAGCCTGTTCGAGCTGGAGAACG
GCCGGAAGCGGATGCTGGCCAGCGCCGGCGAGCTGCAGAAGGGCAACGAGCTGGCCCTGCCC
AGCAAGTACGTGAACTTCCTGTACCTGGCCAGCCACTACGAGAAGCTGAAGGGCAGCCCCGA
GGACAACGAGCAGAAGCAGCTGTTCGTGGAGCAGCACAAGCACTACCTGGACGAGATCATCG
AGCAGATCAGCGAGTTCAGCAAGCGGGTGATCCTGGCCGACGCCAACCTGGACAAGGTGCTG
AGCGCCTACAACAAGCACCGGGACAAGCCCATCCGGGAGCAGGCCGAGAACATCATCCACCT
GTTCACCCTGACCAACCTGGGCGCCCCCGCCGCCTTCAAGTACTTCGACACCACCATCGACC
GGAAGCGGTACACCAGCACCAAGGAGGTGCTGGACGCCACCCTGATCCACCAGAGCATCACC
GGCCTGTACGAGACCCGGATCGACCTGAGCCAGCTGGGCGGCGACAAGCGGCCCGCCGCCAC
CAAGAAGGCCGGCCAGGCCAAGAAGAAGAAGGCCAGCGACGCCAAGAGCCTGACCGCCTGGA
GCCGGACCCTGGTGACCTTCAAGGACGTGTTCGTGGACTTCACCCGGGAGGAGTGGAAGCTG
CTGGACACCGCCCAGCAGATCCTGTACCGGAACGTGATGCTGGAGAACTACAAGAACCTGGT
GAGCCTGGGCTACCAGCTGACCAAGCCCGACGTGATCCTGCGGCTGGAGAAGGGCGAGGAGC
CCTGGCTGGTGGAGCGGGAGATCCACCAGGAGACCCACCCCGACAGCGAGACCGCCTTCGAG
ATCAAGAGCAGCGTGAGCGGCGGCAAGCGGCCCGCCGCCACCAAGAAGGCCGGCCAGGCCAA
GAAGAAGAAGGGCAGCTACCCCTACGACGTGCCCGACTACGCCTGAGcggccgcttaattaa
gctgccttctgcggggcttgccttctggccatgcccttcttctctcccttgcacctgtacct
cttggtctttgaataaagcctgagtaggaagtctagaaaaaaaaaaaaaaaaaaaaaaaaaa
aaaaaaaaaaaaaaaaaaaaaaaaaaaaaaaaaaaaaaaaaaaaaaaaaaaaaa

[0563] In some embodiments, an expression repressor comprises the amino acid sequence of SEQ ID NOs: 96 or 72. In some embodiments, an expression repressor described herein comprises a an amino acid sequence of SEQ ID NO: 72 or 96 or a sequence with at least 80, 85, 90, 95, 99, or 100% identity thereto, or having no more than 20, 19, 18, 17, 16, 15, 14, 13, 12, 11, 10, 9, 8, 7, 6, 5, 4, 3, 2, or 1 positions of difference thereto.

Sp-dCas9-KRAB Protein sequence:
(SEQ ID NO: 96)
MAPKKKRKVGIHGVPAADKKYSIGLAIGTNSVGWAVITDEYKVPSKKFKV
LGNTDRHSIKKNLIGALLFDSGETAEATRLKRTARRRYTRRKNRICYLQE
IFSNEMAKVDDSFFHRLEESFLVEEDKKHERHPIFGNIVDEVAYHEKYPT
IYHLRKKLVDSTDKADLRLIYLALAHMIKFRGHFLIEGDLNPDNSDVDKL
FIQLVQTYNQLFEENPINASGVDAKAILSARLSKSRRLENLIAQLPGEKK
NGLFGNLIALSLGLTPNFKSNFDLAEDAKLQLSKDTYDDDLDNLLAQIGD
QYADLFLAAKNLSDAILLSDILRVNTEITKAPLSASMIKRYDEHHQDLTL
LKALVRQQLPEKYKEIFFDQSKNGYAGYIDGGASQEEFYKFIKPILEKMD
GTEELLVKLNREDLLRKQRTFDNGSIPHQIHLGELHAILRRQEDFYPFLK
DNREKIEKILTFRIPYYVGPLARGNSRFAWMTRKSEETITPWNFEEVVDK
GASAQSFIERMTNFDKNLPNEKVLPKHSLLYEYFTVYNELTKVKYVTEGM
RKPAFLSGEQKKAIVDLLFKTNRKVTVKQLKEDYFKKIECFDSVEISGVE
DRFNASLGTYHDLLKIIKDKDFLDNEENEDILEDIVLTLTLFEDREMIEE
RLKTYAHLFDDKVMKQLKRRRYTGWGRLSRKLINGIRDKQSGKTILDFLK
SDGFANRNFMQLIHDDSLTFKEDIQKAQVSGQGDSLHEHIANLAGSPAIK
KGILQTVKVVDELVKVMGRHKPENIVIEMARENQTTQKGQKNSRERMKRI
EEGIKELGSQILKEHPVENTQLQNEKLYLYYLQNGRDMYVDQELDINRLS
DYDVAAIVPQSFLKDDSIDNKVLTRSDKARGKSDNVPSEEVVKKMKNYWR
QLLNAKLITQRKFDNLTKAERGGLSELDKAGFIKRQLVETRQITKHVAQI
LDSRMNTKYDENDKLIREVKVITLKSKLVSDFRKDFQFYKVREINNYHHA
HDAYLNAVVGTALIKKYPKLESEFVYGDYKVYDVRKMIAKSEQEIGKATA
KYFFYSNIMNFFKTEITLANGEIRKRPLIETNGETGEIVWDKGRDFATVR
KVLSMPQVNIVKKTEVQTGGFSKESILPKRNSDKLIARKKDWDPKKYGGF
DSPTVAYSVLVVAKVEKGKSKKLKSVKELLGITIMERSSFEKNPIDFLEA
KGYKEVKKDLIIKLPKYSLFELENGRKRMLASAGELQKGNELALPSKYVN
FLYLASHYEKLKGSPEDNEQKQLFVEQHKHYLDEIIEQISEFSKRVILAD
ANLDKVLSAYNKHRDKPIREQAENIIHLFTLTNLGAPAAFKYFDTTIDRK
RYTSTKEVLDATLIHQSITGLYETRIDLSQLGGDKRPAATKKAGQAKKKK
ASDAKSLTAWSRTLVTFKDVFVDFTREEWKLLDTAQQILYRNVMLENYKN
LVSLGYQLTKPDVILRLEKGEEPWLVEREIHQETHPDSETAFEIKSSVSG
GKRPAATKKAGQAKKKKGSYPYDVPDYA
(SEQ ID NO: 72)
MAPKKKRKVGIHGVPAADKKYSIGLAIGTNSVGWAVITDEYKVPSKKFKV
LGNTDRHSIKKNLIGALLFDSGETAEATRLKRTARRRYTRRKNRICYLQE
IFSNEMAKVDDSFFHRLEESFLVEEDKKHERHPIFGNIVDEVAYHEKYPT
IYHLRKKLVDSTDKADLRLIYLALAHMIKFRGHFLIEGDLNPDNSDVDKL
FIQLVQTYNQLFEENPINASGVDAKAILSARLSKSRRLENLIAQLPGEKK
NGLFGNLIALSLGLTPNFKSNFDLAEDAKLQLSKDTYDDDLDNLLAQIGD
QYADLFLAAKNLSDAILLSDILRVNTEITKAPLSASMIKRYDEHHQDLTL
LKALVRQQLPEKYKEIFFDQSKNGYAGYIDGGASQEEFYKFIKPILEKMD
GTEELLVKLNREDLLRKQRTFDNGSIPHQIHLGELHAILRRQEDFYPFLK
DNREKIEKILTFRIPYYVGPLARGNSRFAWMTRKSEETITPWNFEEVVDK
GASAQSFIERMTNFDKNLPNEKVLPKHSLLYEYFTVYNELTKVKYVTEGM
RKPAFLSGEQKKAIVDLLFKTNRKVTVKQLKEDYFKKIECFDSVEISGVE
DRFNASLGTYHDLLKIIKDKDFLDNEENEDILEDIVLTLTLFEDREMIEE
RLKTYAHLFDDKVMKQLKRRRYTGWGRLSRKLINGIRDKQSGKTILDFLK
SDGFANRNFMQLIHDDSLTFKEDIQKAQVSGQGDSLHEHIANLAGSPAIK
KGILQTVKVVDELVKVMGRHKPENIVIEMARENQTTQKGQKNSRERMKRI
EEGIKELGSQILKEHPVENTQLQNEKLYLYYLQNGRDMYVDQELDINRLS
DYDVAAIVPQSFLKDDSIDNKVLTRSDKARGKSDNVPSEEVVKKMKNYWR
QLLNAKLITQRKFDNLTKAERGGLSELDKAGFIKRQLVETRQITKHVAQI
LDSRMNTKYDENDKLIREVKVITLKSKLVSDFRKDFQFYKVREINNYHHA
HDAYLNAVVGTALIKKYPKLESEFVYGDYKVYDVRKMIAKSEQEIGKATA
KYFFYSNIMNFFKTEITLANGEIRKRPLIETNGETGEIVWDKGRDFATVR
KVLSMPQVNIVKKTEVQTGGFSKESILPKRNSDKLIARKKDWDPKKYGGF
DSPTVAYSVLVVAKVEKGKSKKLKSVKELLGITIMERSSFEKNPIDFLEA
KGYKEVKKDLIIKLPKYSLFELENGRKRMLASAGELQKGNELALPSKYVN
FLYLASHYEKLKGSPEDNEQKQLFVEQHKHYLDEIIEQISEFSKRVILAD
ANLDKVLSAYNKHRDKPIREQAENIIHLFTLTNLGAPAAFKYFDTTIDRK
RYTSTKEVLDATLIHQSITGLYETRIDLSQLGGDKRPAATKKAGQAKKKK
ASDAKSLTAWSRTLVTFKDVFVDFTREEWKLLDTAQQILYRNVMLENYKN
LVSLGYQLTKPDVILRLEKGEEPWLVEREIHQETHPDSETAFEIKSSVSG
GKRPAATKKAGQAKKKKGS

[0564] In some embodiments, an expression repressor comprises a DNA-targeting moiety comprising dCas9, e.g., an S. pyogenes dCas9, and a repressor domain comprising DNMT1, e.g., a DNMT1 domain. In some embodiments, the expression repressor is encoded by the nucleic acid sequence of SEQ ID NOs: 23 (e.g., a nucleic acid (e.g., cDNA) encoding the expression repressor). In some embodiments, a nucleic acid described herein comprises a nucleic acid sequence of SEQ ID NO: 23 or a sequence with at least 80, 85, 90, 95, 99, or 100% identity thereto, or having no more than 20, 19, 18, 17, 16, 15, 14, 13, 12, 11, 10, 9, 8, 7, 6, 5, 4, 3, 2, or 1 positions of difference thereto.

dCas9-DNMT1 (MR-29419)
(SEQ ID NO: 23)
AGGAAATAAGAGAGAAAAGAAGAGTAAGAAGAAATATAAG
AGCCACCATGGCCCCCAAGAAGAAGCGGAAGGTGGGCATC
CACGGCGTGCCCGCCGCCGACAAGAAGTACAGCATCGGCC
TGGCCATCGGCACCAACAGCGTGGGCTGGGCCGTGATCAC
CGACGAGTACAAGGTGCCCAGCAAGAAGTTCAAGGTGCTG
GGCAACACCGACCGGCACAGCATCAAGAAGAACCTGATCG
GCGCCCTGCTGTTCGACAGCGGCGAGACCGCCGAGGCCAC
CCGGCTGAAGCGGACCGCCCGGCGGCGGTACACCCGGCGG
AAGAACCGGATCTGCTACCTGCAGGAGATCTTCAGCAACG
AGATGGCCAAGGTGGACGACAGCTTCTTCCACCGGCTGGA
GGAGAGCTTCCTGGTGGAGGAGGACAAGAAGCACGAGCGG
CACCCCATCTTCGGCAACATCGTGGACGAGGTGGCCTACC
ACGAGAAGTACCCCACCATCTACCACCTGCGGAAGAAGCT
GGTGGACAGCACCGACAAGGCCGACCTGCGGCTGATCTAC
CTGGCCCTGGCCCACATGATCAAGTTCCGGGGCCACTTCC
TGATCGAGGGCGACCTGAACCCCGACAACAGCGACGTGGA
CAAGCTGTTCATCCAGCTGGTGCAGACCTACAACCAGCTG
TTCGAGGAGAACCCCATCAACGCCAGCGGCGTGGACGCCA
AGGCCATCCTGAGCGCCCGGCTGAGCAAGAGCCGGCGGCT
GGAGAACCTGATCGCCCAGCTGCCCGGCGAGAAGAAGAAC
GGCCTGTTCGGCAACCTGATCGCCCTGAGCCTGGGCCTGA
CCCCCAACTTCAAGAGCAACTTCGACCTGGCCGAGGACGC
CAAGCTGCAGCTGAGCAAGGACACCTACGACGACGACCTG
GACAACCTGCTGGCCCAGATCGGCGACCAGTACGCCGACC
TGTTCCTGGCCGCCAAGAACCTGAGCGACGCCATCCTGCT
GAGCGACATCCTGCGGGTGAACACCGAGATCACCAAGGCC
CCCCTGAGCGCCAGCATGATCAAGCGGTACGACGAGCACC
ACCAGGACCTGACCCTGCTGAAGGCCCTGGTGCGGCAGCA
GCTGCCCGAGAAGTACAAGGAGATCTTCTTCGACCAGAGC
AAGAACGGCTACGCCGGCTACATCGACGGCGGCGCCAGCC
AGGAGGAGTTCTACAAGTTCATCAAGCCCATCCTGGAGAA
GATGGACGGCACCGAGGAGCTGCTGGTGAAGCTGAACCGG
GAGGACCTGCTGCGGAAGCAGCGGACCTTCGACAACGGCA
GCATCCCCCACCAGATCCACCTGGGCGAGCTGCACGCCAT
CCTGCGGCGGCAGGAGGACTTCTACCCCTTCCTGAAGGAC
AACCGGGAGAAGATCGAGAAGATCCTGACCTTCCGGATCC
CCTACTACGTGGGCCCCCTGGCCCGGGGCAACAGCCGGTT
CGCCTGGATGACCCGGAAATCCGAGGAGACCATCACCCCC
TGGAACTTCGAGGAGGTGGTGGACAAGGGCGCCAGCGCCC
AGAGCTTCATCGAGCGGATGACCAACTTCGACAAGAACCT
GCCCAACGAGAAGGTGCTGCCCAAGCACAGCCTGCTGTAC
GAGTACTTCACCGTGTACAACGAGCTGACCAAGGTGAAGT
ACGTGACCGAGGGCATGCGGAAGCCCGCCTTCCTGAGCGG
CGAGCAGAAGAAGGCCATCGTGGACCTGCTGTTCAAGACC
AACCGGAAGGTGACCGTGAAGCAGCTGAAGGAGGACTACT
TCAAGAAGATCGAGTGCTTCGACAGCGTGGAGATCAGCGG
CGTGGAGGACCGGTTCAACGCCAGCCTGGGCACCTACCAC
GACCTGCTGAAGATCATCAAGGACAAGGACTTCCTGGACA
ACGAGGAGAACGAGGACATCCTGGAGGACATCGTGCTGAC
CCTGACCCTGTTCGAGGACCGGGAGATGATCGAGGAGCGG
CTGAAAACCTACGCCCACCTGTTCGACGACAAGGTGATGA
AGCAGCTGAAGCGGCGGCGGTACACCGGCTGGGGCCGGCT
GAGCCGGAAGCTGATCAACGGCATCCGGGACAAGCAGAGC
GGCAAGACCATCCTGGACTTCCTGAAATCCGACGGCTTCG
CCAACCGGAACTTCATGCAGCTGATCCACGACGACAGCCT
GACCTTCAAGGAGGACATCCAGAAGGCCCAGGTGAGCGGC
CAGGGCGACAGCCTGCACGAGCACATCGCCAACCTGGCCG
GCAGCCCCGCCATCAAGAAGGGCATCCTGCAGACCGTGAA
GGTGGTGGACGAGCTGGTGAAGGTGATGGGCCGGCACAAG
CCCGAGAACATCGTGATCGAGATGGCCCGGGAGAACCAGA
CCACCCAGAAGGGCCAGAAGAACAGCCGGGAGCGGATGAA
GCGGATCGAGGAGGGCATCAAGGAGCTGGGCAGCCAGATC
CTGAAGGAGCACCCCGTGGAGAACACCCAGCTGCAGAACG
AGAAGCTGTACCTGTACTACCTGCAGAACGGCCGGGACAT
GTACGTGGACCAGGAGCTGGACATCAACCGGCTGAGCGAC
TACGACGTGGCCGCCATCGTGCCCCAGAGCTTCCTGAAGG
ACGACAGCATCGACAACAAGGTGCTGACCCGGAGCGACAA
GGCCCGGGGCAAGAGCGACAACGTGCCCAGCGAGGAGGTG
GTGAAGAAGATGAAGAACTACTGGCGGCAGCTGCTGAACG
CCAAGCTGATCACCCAGCGGAAGTTCGACAACCTGACCAA
GGCCGAGCGGGGCGGCCTGAGCGAGCTGGACAAGGCCGGC
TTCATCAAGCGGCAGCTGGTGGAGACCCGGCAGATCACCA
AGCACGTGGCCCAGATCCTGGACAGCCGGATGAACACCAA
GTACGACGAGAACGACAAGCTGATCCGGGAGGTGAAGGTG
ATCACCCTGAAATCCAAGCTGGTGAGCGACTTCCGGAAGG
ACTTCCAGTTCTACAAGGTGCGGGAGATCAACAACTACCA
CCACGCCCACGACGCCTACCTGAACGCCGTGGTGGGCACC
GCCCTGATCAAGAAGTACCCCAAGCTGGAGAGCGAGTTCG
TGTACGGCGACTACAAGGTGTACGACGTGCGGAAGATGAT
CGCCAAGAGCGAGCAGGAGATCGGCAAGGCCACCGCCAAG
TACTTCTTCTACAGCAACATCATGAACTTCTTCAAGACCG
AGATCACCCTGGCCAACGGCGAGATCCGGAAGCGGCCCCT
GATCGAGACCAACGGCGAGACCGGCGAGATCGTGTGGGAC
AAGGGCCGGGACTTCGCCACCGTGCGGAAGGTGCTGAGCA
TGCCCCAGGTGAACATCGTGAAGAAAACCGAGGTGCAGAC
CGGCGGCTTCAGCAAGGAGAGCATCCTGCCCAAGCGGAAC
AGCGACAAGCTGATCGCCCGGAAGAAGGACTGGGACCCCA
AGAAGTACGGCGGCTTCGACAGCCCCACCGTGGCCTACAG
CGTGCTGGTGGTGGCCAAGGTGGAGAAGGGCAAGAGCAAG
AAGCTGAAATCCGTGAAGGAGCTGCTGGGCATCACCATCA
TGGAGCGGAGCAGCTTCGAGAAGAACCCCATCGACTTCCT
GGAGGCCAAGGGCTACAAGGAGGTGAAGAAGGACCTGATC
ATCAAGCTGCCCAAGTACAGCCTGTTCGAGCTGGAGAACG
GCCGGAAGCGGATGCTGGCCAGCGCCGGCGAGCTGCAGAA
GGGCAACGAGCTGGCCCTGCCCAGCAAGTACGTGAACTTC
CTGTACCTGGCCAGCCACTACGAGAAGCTGAAGGGCAGCC
CCGAGGACAACGAGCAGAAGCAGCTGTTCGTGGAGCAGCA
CAAGCACTACCTGGACGAGATCATCGAGCAGATCAGCGAG
TTCAGCAAGCGGGTGATCCTGGCCGACGCCAACCTGGACA
AGGTGCTGAGCGCCTACAACAAGCACCGGGACAAGCCCAT
CCGGGAGCAGGCCGAGAACATCATCCACCTGTTCACCCTG
ACCAACCTGGGCGCCCCCGCCGCCTTCAAGTACTTCGACA
CCACCATCGACCGGAAGCGGTACACCAGCACCAAGGAGGT
GCTGGACGCCACCCTGATCCACCAGAGCATCACCGGCCTG
TACGAGACCCGGATCGACCTGAGCCAGCTGGGCGGCGACA
GCGGCGGCAAGCGGCCCGCCGCCACCAAGAAGGCCGGCCA
GGCCAAGAAGAAGAAGTCGGGCGGGGGTGGCTCAGTGGAT
CTGAGGACACTCGACGTGTTTAGCGGATGCGGCGGACTCT
CCGAAGGCTTCCACCAAGCCGGAATTTCCGACACACTCTG
GGCCATTGAGATGTGGGACCCCGCCGCTCAAGCCTTCAGA
CTGAATAATCCCGGCTCCACCGTGTTCACCGAGGACTGCA
ACATTCTGCTGAAGCTGGTGATGGCTGGCGAAACCACCAA
CTCTAGAGGCCAGAGGCTGCCCCAGAAGGGAGATGTGGAA
ATGCTCTGTGGAGGCCCTCCTTGCCAAGGCTTCTCCGGCA
TGAACAGGTTCAACTCTAGAACATACAGCAAGTTCAAGAA
CTCTCTGGTCGTGAGCTTTCTGAGCTACTGCGACTACTAT
AGACCTAGGTTCTTTCTGCTGGAGAACGTGAGAAATTTCG
TGTCCTTCAAGAGGAGCATGGTGCTGAAGCTGACACTGAG
GTGTCTGGTGAGGATGGGCTACCAGTGCACATTCGGAGTG
CTGCAAGCTGGCCAGTACGGCGTGGCCCAGACCAGAAGGA
GGGCCATCATTCTGGCTGCTGCCCCCGGCGAGAAACTCCC
TCTGTTCCCCGAGCCCCTCCACGTGTTCGCCCCTAGAGCT
TGCCAGCTGAGCGTGGTGGTCGACGATAAGAAGTTCGTGA
GCAACATCACAAGGCTGTCCAGCGGACCCTTCAGAACCAT
TACCGTGAGGGATACCATGTCCGACCTCCCCGAGGTGAGG
AATGGCGCCAGCGCTCTGGAGATTTCCTACAACGGCGAAC
CTCAGAGCTGGTTCCAAAGGCAGCTGAGAGGCGCTCAGTA
TCAGCCCATTCTGAGGGACCACATCTGCAAAGATATGAGC
GCTCTGGTGGCCGCTAGAATGAGACATATTCCTCTGGCCC
CCGGCAGCGACTGGAGAGATCTGCCCAATATTGAGGTGAG
ACTCAGCGACGGAACAATGGCTAGAAAACTGAGGTACACC
CATCATGATAGAAAGAACGGAAGGAGCAGCAGCGGCGCTC
TGAGAGGAGTGTGTAGCTGCGTGGAAGCTGGCAAGGCTTG
CGATCCCGCCGCTAGGCAGTTCAATACCCTCATCCCTTGG
TGTCTGCCTCACACCGGCAACAGACACAATCATTGGGCTG
GACTGTATGGAAGGCTCGAATGGGACGGCTTTTTCAGCAC
CACCGTGACCAATCCCGAACCTATGGGCAAGCAAGGAAGG
GTGCTCCACCCCGAGCAGCATAGAGTCGTGTCCGTGAGAG
AATGCGCTAGAAGCCAAGGCTTCCCCGACACCTATAGACT
GTTCGGCAACATTCTGGATAAGCACAGACAAGTGGGAAAT
GCTGTCCCTCCTCCTCTGGCCAAGGCTATCGGACTGGAGA
TCAAGCTGTGTATGCTCGCCAAAGCTAGGGAGAGCGCTTC
CGCCAAGATTAAGGAGGAGGAGGCCGCCAAGGACGGAGGT
GGCGGATCGGGAAAGCGGCCCGCCGCCACCAAGAAGGCCG
GTCAGGCCAAGAAGAAGAAGGGCAGCTACCCCTACGACGT
GCCCGACTACGCCTGAGCGGCCGCTTAATTAAGCTGCCTT
CTGCGGGGCTTGCCTTCTGGCCATGCCCTTCTTCTCTCCC
TTGCACCTGTACCTCTTGGTCTTTGAATAAAGCCTGAGTA
GGAAGTCTAGAAAAAAAAAAAAAAAAAAAAAAAAAAAAAA
AAAAAAAAAAAAAAAAAAAAAAAAAAAAAAAAAAAAAAAA
AAAAAAAAAA

[0565] In some embodiments, an expression repressor comprises the amino acid sequence of SEQ ID NOs: 34 or 69. In some embodiments, an expression repressor described herein comprises an amino acid sequence of SEQ ID NO: 34 or 69, or a sequence with at least 80, 85, 90, 95, 99, or 100% identity thereto, or having no more than 20, 19, 18, 17, 16, 15, 14, 13, 12, 11, 10, 9, 8, 7, 6, 5, 4, 3, 2, or 1 positions of difference thereto.

dCas9-DNMT
(SEQ ID NO: 34)
MAPKKKRKVGIHGVPAADKKYSIGLAIGTNSVGWAVITDE
YKVPSKKFKVLGNTDRHSIKKNLIGALLFDSGETAEATRL
KRTARRRYTRRKNRICYLQEIFSNEMAKVDDSFFHRLEES
FLVEEDKKHERHPIFGNIVDEVAYHEKYPTIYHLRKKLVD
STDKADLRLIYLALAHMIKFRGHFLIEGDLNPDNSDVDKL
FIQLVQTYNQLFEENPINASGVDAKAILSARLSKSRRLEN
LIAQLPGEKKNGLFGNLIALSLGLTPNFKSNFDLAEDAKL
QLSKDTYDDDLDNLLAQIGDQYADLFLAAKNLSDAILLSD
ILRVNTEITKAPLSASMIKRYDEHHQDLTLLKALVRQQLP
EKYKEIFFDQSKNGYAGYIDGGASQEEFYKFIKPILEKMD
GTEELLVKLNREDLLRKQRTFDNGSIPHQIHLGELHAILR
RQEDFYPFLKDNREKIEKILTFRIPYYVGPLARGNSRFAW
MTRKSEETITPWNFEEVVDKGASAQSFIERMTNFDKNLPN
EKVLPKHSLLYEYFTVYNELTKVKYVTEGMRKPAFLSGEQ
KKAIVDLLFKTNRKVTVKQLKEDYFKKIECFDSVEISGVE
DRFNASLGTYHDLLKIIKDKDFLDNEENEDILEDIVLTLT
LFEDREMIEERLKTYAHLFDDKVMKQLKRRRYTGWGRLSR
KLINGIRDKQSGKTILDFLKSDGFANRNFMQLIHDDSLTF
KEDIQKAQVSGQGDSLHEHIANLAGSPAIKKGILQTVKVV
DELVKVMGRHKPENIVIEMARENQTTQKGQKNSRERMKRI
EEGIKELGSQILKEHPVENTQLQNEKLYLYYLQNGRDMYV
DQELDINRLSDYDVAAIVPQSFLKDDSIDNKVLTRSDKAR
GKSDNVPSEEVVKKMKNYWRQLLNAKLITQRKFDNLTKAE
RGGLSELDKAGFIKRQLVETRQITKHVAQILDSRMNTKYD
ENDKLIREVKVITLKSKLVSDFRKDFQFYKVREINNYHHA
HDAYLNAVVGTALIKKYPKLESEFVYGDYKVYDVRKMIAK
SEQEIGKATAKYFFYSNIMNFFKTEITLANGEIRKRPLIE
TNGETGEIVWDKGRDFATVRKVLSMPQVNIVKKTEVQTGG
FSKESILPKRNSDKLIARKKDWDPKKYGGFDSPTVAYSVL
VVAKVEKGKSKKLKSVKELLGITIMERSSFEKNPIDFLEA
KGYKEVKKDLIIKLPKYSLFELENGRKRMLASAGELQKGN
ELALPSKYVNFLYLASHYEKLKGSPEDNEQKQLFVEQHKH
YLDEIIEQISEFSKRVILADANLDKVLSAYNKHRDKPIRE
QAENIIHLFTLTNLGAPAAFKYFDTTIDRKRYTSTKEVLD
ATLIHQSITGLYETRIDLSQLGGDSGGKRPAATKKAGQAK
KKKSGGGGSVDLRTLDVFSGCGGLSEGFHQAGISDTLWAI
EMWDPAAQAFRLNNPGSTVFTEDCNILLKLVMAGETTNSR
GQRLPQKGDVEMLCGGPPCQGFSGMNRFNSRTYSKFKNSL
VVSFLSYCDYYRPRFFLLENVRNFVSFKRSMVLKLTLRCL
VRMGYQCTFGVLQAGQYGVAQTRRRAIILAAAPGEKLPLF
PEPLHVFAPRACQLSVVVDDKKFVSNITRLSSGPFRTITV
RDTMSDLPEVRNGASALEISYNGEPQSWFQRQLRGAQYQP
ILRDHICKDMSALVAARMRHIPLAPGSDWRDLPNIEVRLS
DGTMARKLRYTHHDRKNGRSSSGALRGVCSCVEAGKACDP
AARQFNTLIPWCLPHTGNRHNHWAGLYGRLEWDGFFSTTV
TNPEPMGKQGRVLHPEQHRVVSVRECARSQGFPDTYRLFG
NILDKHRQVGNAVPPPLAKAIGLEIKLCMLAKARESASAK
IKEEEAAKDGGGGSGKRPAATKKAGQAKKKKGSYPYDVPD
YA
dCas9-DNMT without HA tag
(SEQ ID NO: 69)
MAPKKKRKVGIHGVPAADKKYSIGLAIGTNSVGWAVITDE
YKVPSKKFKVLGNTDRHSIKKNLIGALLFDSGETAEATRL
KRTARRRYTRRKNRICYLQEIFSNEMAKVDDSFFHRLEES
FLVEEDKKHERHPIFGNIVDEVAYHEKYPTIYHLRKKLVD
STDKADLRLIYLALAHMIKFRGHFLIEGDLNPDNSDVDKL
FIQLVQTYNQLFEENPINASGVDAKAILSARLSKSRRLEN
LIAQLPGEKKNGLFGNLIALSLGLTPNFKSNFDLAEDAKL
QLSKDTYDDDLDNLLAQIGDQYADLFLAAKNLSDAILLSD
ILRVNTEITKAPLSASMIKRYDEHHQDLTLLKALVRQQLP
EKYKEIFFDQSKNGYAGYIDGGASQEEFYKFIKPILEKMD
GTEELLVKLNREDLLRKQRTFDNGSIPHQIHLGELHAILR
RQEDFYPFLKDNREKIEKILTFRIPYYVGPLARGNSRFAW
MTRKSEETITPWNFEEVVDKGASAQSFIERMTNFDKNLPN
EKVLPKHSLLYEYFTVYNELTKVKYVTEGMRKPAFLSGEQ
KKAIVDLLFKTNRKVTVKQLKEDYFKKIECFDSVEISGVE
DRFNASLGTYHDLLKIIKDKDFLDNEENEDILEDIVLTLT
LFEDREMIEERLKTYAHLFDDKVMKQLKRRRYTGWGRLSR
KLINGIRDKQSGKTILDFLKSDGFANRNFMQLIHDDSLTF
KEDIQKAQVSGQGDSLHEHIANLAGSPAIKKGILQTVKVV
DELVKVMGRHKPENIVIEMARENQTTQKGQKNSRERMKRI
EEGIKELGSQILKEHPVENTQLQNEKLYLYYLQNGRDMYV
DQELDINRLSDYDVAAIVPQSFLKDDSIDNKVLTRSDKAR
GKSDNVPSEEVVKKMKNYWRQLLNAKLITQRKFDNLTKAE
RGGLSELDKAGFIKRQLVETRQITKHVAQILDSRMNTKYD
ENDKLIREVKVITLKSKLVSDFRKDFQFYKVREINNYHHA
HDAYLNAVVGTALIKKYPKLESEFVYGDYKVYDVRKMIAK
SEQEIGKATAKYFFYSNIMNFFKTEITLANGEIRKRPLIE
TNGETGEIVWDKGRDFATVRKVLSMPQVNIVKKTEVQTGG
FSKESILPKRNSDKLIARKKDWDPKKYGGFDSPTVAYSVL
VVAKVEKGKSKKLKSVKELLGITIMERSSFEKNPIDFLEA
KGYKEVKKDLIIKLPKYSLFELENGRKRMLASAGELQKGN
ELALPSKYVNFLYLASHYEKLKGSPEDNEQKQLFVEQHKH
YLDEIIEQISEFSKRVILADANLDKVLSAYNKHRDKPIRE
QAENIIHLFTLTNLGAPAAFKYFDTTIDRKRYTSTKEVLD
ATLIHQSITGLYETRIDLSQLGGDSGGKRPAATKKAGQAK
KKKSGGGGSVDLRTLDVFSGCGGLSEGFHQAGISDTLWAI
EMWDPAAQAFRLNNPGSTVFTEDCNILLKLVMAGETTNSR
GQRLPQKGDVEMLCGGPPCQGFSGMNRFNSRTYSKFKNSL
VVSFLSYCDYYRPRFFLLENVRNFVSFKRSMVLKLTLRCL
VRMGYQCTFGVLQAGQYGVAQTRRRAIILAAAPGEKLPLF
PEPLHVFAPRACQLSVVVDDKKFVSNITRLSSGPFRTITV
RDTMSDLPEVRNGASALEISYNGEPQSWFQRQLRGAQYQP
ILRDHICKDMSALVAARMRHIPLAPGSDWRDLPNIEVRLS
DGTMARKLRYTHHDRKNGRSSSGALRGVCSCVEAGKACDP
AARQFNTLIPWCLPHTGNRHNHWAGLYGRLEWDGFFSTTV
TNPEPMGKQGRVLHPEQHRVVSVRECARSQGFPDTYRLFG
NILDKHRQVGNAVPPPLAKAIGLEIKLCMLAKARESASAK
IKEEEAAKDGGGGSGKRPAATKKAGQAKKKKGS

[0566] In some embodiments, an expression repressor comprises a DNA-targeting moiety comprising dCas9, e.g., an S. pyogenes dCas9, and a repressor domain comprising DNMT3a/3L. In some embodiments, the expression repressor is encoded by the nucleic acid sequence of SEQ ID NOs: 24 (e.g., a nucleic acid (e.g., cDNA) encoding a fully human expression repressor) and/or 25 (e.g., a nucleic acid (e.g., cDNA) encoding a chimeric expression repressor). In some embodiments, a nucleic acid described herein comprises a nucleic acid sequence of SEQ ID NO: 24 or 25 or a sequence with at least 80, 85, 90, 95, 99, or 100% identity thereto, or having no more than 20, 19, 18, 17, 16, 15, 14, 13, 12, 11, 10, 9, 8, 7, 6, 5, 4, 3, 2, or 1 positions of difference thereto.

dCas9-DNMT 3a/3L (h) (MR-29414)
(SEQ ID NO: 24)
AGGAAATAAGAGAGAAAAGAAGAGTAAGAAGAAATATAAG
AGCCACCATGGCCCCCAAGAAGAAGCGGAAGGTGGGCATC
CACGGCGTGCCCGCCGCCGACAAGAAGTACAGCATCGGCC
TGGCCATCGGCACCAACAGCGTGGGCTGGGCCGTGATCAC
CGACGAGTACAAGGTGCCCAGCAAGAAGTTCAAGGTGCTG
GGCAACACCGACCGGCACAGCATCAAGAAGAACCTGATCG
GCGCCCTGCTGTTCGACAGCGGCGAGACCGCCGAGGCCAC
CCGGCTGAAGCGGACCGCCCGGCGGCGGTACACCCGGCGG
AAGAACCGGATCTGCTACCTGCAGGAGATCTTCAGCAACG
AGATGGCCAAGGTGGACGACAGCTTCTTCCACCGGCTGGA
GGAGAGCTTCCTGGTGGAGGAGGACAAGAAGCACGAGCGG
CACCCCATCTTCGGCAACATCGTGGACGAGGTGGCCTACC
ACGAGAAGTACCCCACCATCTACCACCTGCGGAAGAAGCT
GGTGGACAGCACCGACAAGGCCGACCTGCGGCTGATCTAC
CTGGCCCTGGCCCACATGATCAAGTTCCGGGGCCACTTCC
TGATCGAGGGCGACCTGAACCCCGACAACAGCGACGTGGA
CAAGCTGTTCATCCAGCTGGTGCAGACCTACAACCAGCTG
TTCGAGGAGAACCCCATCAACGCCAGCGGCGTGGACGCCA
AGGCCATCCTGAGCGCCCGGCTGAGCAAGAGCCGGCGGCT
GGAGAACCTGATCGCCCAGCTGCCCGGCGAGAAGAAGAAC
GGCCTGTTCGGCAACCTGATCGCCCTGAGCCTGGGCCTGA
CCCCCAACTTCAAGAGCAACTTCGACCTGGCCGAGGACGC
CAAGCTGCAGCTGAGCAAGGACACCTACGACGACGACCTG
GACAACCTGCTGGCCCAGATCGGCGACCAGTACGCCGACC
TGTTCCTGGCCGCCAAGAACCTGAGCGACGCCATCCTGCT
GAGCGACATCCTGCGGGTGAACACCGAGATCACCAAGGCC
CCCCTGAGCGCCAGCATGATCAAGCGGTACGACGAGCACC
ACCAGGACCTGACCCTGCTGAAGGCCCTGGTGCGGCAGCA
GCTGCCCGAGAAGTACAAGGAGATCTTCTTCGACCAGAGC
AAGAACGGCTACGCCGGCTACATCGACGGCGGCGCCAGCC
AGGAGGAGTTCTACAAGTTCATCAAGCCCATCCTGGAGAA
GATGGACGGCACCGAGGAGCTGCTGGTGAAGCTGAACCGG
GAGGACCTGCTGCGGAAGCAGCGGACCTTCGACAACGGCA
GCATCCCCCACCAGATCCACCTGGGCGAGCTGCACGCCAT
CCTGCGGCGGCAGGAGGACTTCTACCCCTTCCTGAAGGAC
AACCGGGAGAAGATCGAGAAGATCCTGACCTTCCGGATCC
CCTACTACGTGGGCCCCCTGGCCCGGGGCAACAGCCGGTT
CGCCTGGATGACCCGGAAATCCGAGGAGACCATCACCCCC
TGGAACTTCGAGGAGGTGGTGGACAAGGGCGCCAGCGCCC
AGAGCTTCATCGAGCGGATGACCAACTTCGACAAGAACCT
GCCCAACGAGAAGGTGCTGCCCAAGCACAGCCTGCTGTAC
GAGTACTTCACCGTGTACAACGAGCTGACCAAGGTGAAGT
ACGTGACCGAGGGCATGCGGAAGCCCGCCTTCCTGAGCGG
CGAGCAGAAGAAGGCCATCGTGGACCTGCTGTTCAAGACC
AACCGGAAGGTGACCGTGAAGCAGCTGAAGGAGGACTACT
TCAAGAAGATCGAGTGCTTCGACAGCGTGGAGATCAGCGG
CGTGGAGGACCGGTTCAACGCCAGCCTGGGCACCTACCAC
GACCTGCTGAAGATCATCAAGGACAAGGACTTCCTGGACA
ACGAGGAGAACGAGGACATCCTGGAGGACATCGTGCTGAC
CCTGACCCTGTTCGAGGACCGGGAGATGATCGAGGAGCGG
CTGAAAACCTACGCCCACCTGTTCGACGACAAGGTGATGA
AGCAGCTGAAGCGGCGGCGGTACACCGGCTGGGGCCGGCT
GAGCCGGAAGCTGATCAACGGCATCCGGGACAAGCAGAGC
GGCAAGACCATCCTGGACTTCCTGAAATCCGACGGCTTCG
CCAACCGGAACTTCATGCAGCTGATCCACGACGACAGCCT
GACCTTCAAGGAGGACATCCAGAAGGCCCAGGTGAGCGGC
CAGGGCGACAGCCTGCACGAGCACATCGCCAACCTGGCCG
GCAGCCCCGCCATCAAGAAGGGCATCCTGCAGACCGTGAA
GGTGGTGGACGAGCTGGTGAAGGTGATGGGCCGGCACAAG
CCCGAGAACATCGTGATCGAGATGGCCCGGGAGAACCAGA
CCACCCAGAAGGGCCAGAAGAACAGCCGGGAGCGGATGAA
GCGGATCGAGGAGGGCATCAAGGAGCTGGGCAGCCAGATC
CTGAAGGAGCACCCCGTGGAGAACACCCAGCTGCAGAACG
AGAAGCTGTACCTGTACTACCTGCAGAACGGCCGGGACAT
GTACGTGGACCAGGAGCTGGACATCAACCGGCTGAGCGAC
TACGACGTGGCCGCCATCGTGCCCCAGAGCTTCCTGAAGG
ACGACAGCATCGACAACAAGGTGCTGACCCGGAGCGACAA
GGCCCGGGGCAAGAGCGACAACGTGCCCAGCGAGGAGGTG
GTGAAGAAGATGAAGAACTACTGGCGGCAGCTGCTGAACG
CCAAGCTGATCACCCAGCGGAAGTTCGACAACCTGACCAA
GGCCGAGCGGGGCGGCCTGAGCGAGCTGGACAAGGCCGGC
TTCATCAAGCGGCAGCTGGTGGAGACCCGGCAGATCACCA
AGCACGTGGCCCAGATCCTGGACAGCCGGATGAACACCAA
GTACGACGAGAACGACAAGCTGATCCGGGAGGTGAAGGTG
ATCACCCTGAAATCCAAGCTGGTGAGCGACTTCCGGAAGG
ACTTCCAGTTCTACAAGGTGCGGGAGATCAACAACTACCA
CCACGCCCACGACGCCTACCTGAACGCCGTGGTGGGCACC
GCCCTGATCAAGAAGTACCCCAAGCTGGAGAGCGAGTTCG
TGTACGGCGACTACAAGGTGTACGACGTGCGGAAGATGAT
CGCCAAGAGCGAGCAGGAGATCGGCAAGGCCACCGCCAAG
TACTTCTTCTACAGCAACATCATGAACTTCTTCAAGACCG
AGATCACCCTGGCCAACGGCGAGATCCGGAAGCGGCCCCT
GATCGAGACCAACGGCGAGACCGGCGAGATCGTGTGGGAC
AAGGGCCGGGACTTCGCCACCGTGCGGAAGGTGCTGAGCA
TGCCCCAGGTGAACATCGTGAAGAAAACCGAGGTGCAGAC
CGGCGGCTTCAGCAAGGAGAGCATCCTGCCCAAGCGGAAC
AGCGACAAGCTGATCGCCCGGAAGAAGGACTGGGACCCCA
AGAAGTACGGCGGCTTCGACAGCCCCACCGTGGCCTACAG
CGTGCTGGTGGTGGCCAAGGTGGAGAAGGGCAAGAGCAAG
AAGCTGAAATCCGTGAAGGAGCTGCTGGGCATCACCATCA
TGGAGCGGAGCAGCTTCGAGAAGAACCCCATCGACTTCCT
GGAGGCCAAGGGCTACAAGGAGGTGAAGAAGGACCTGATC
ATCAAGCTGCCCAAGTACAGCCTGTTCGAGCTGGAGAACG
GCCGGAAGCGGATGCTGGCCAGCGCCGGCGAGCTGCAGAA
GGGCAACGAGCTGGCCCTGCCCAGCAAGTACGTGAACTTC
CTGTACCTGGCCAGCCACTACGAGAAGCTGAAGGGCAGCC
CCGAGGACAACGAGCAGAAGCAGCTGTTCGTGGAGCAGCA
CAAGCACTACCTGGACGAGATCATCGAGCAGATCAGCGAG
TTCAGCAAGCGGGTGATCCTGGCCGACGCCAACCTGGACA
AGGTGCTGAGCGCCTACAACAAGCACCGGGACAAGCCCAT
CCGGGAGCAGGCCGAGAACATCATCCACCTGTTCACCCTG
ACCAACCTGGGCGCCCCCGCCGCCTTCAAGTACTTCGACA
CCACCATCGACCGGAAGCGGTACACCAGCACCAAGGAGGT
GCTGGACGCCACCCTGATCCACCAGAGCATCACCGGCCTG
TACGAGACCCGGATCGACCTGAGCCAGCTGGGCGGCGACA
GCGCCGGCGGCGGCGGCAGCGGCGGCGGCGGCAGCGGCGG
CGGCGGCAGCGGCCCCAAGAAGAAGCGGAAGGTGGCCGCC
GCCGGCAGCAACCACGACCAGGAGTTCGACCCCCCCAAGG
TGTACCCCCCCGTGCCCGCCGAGAAGCGGAAGCCCATCCG
GGTGCTGAGCCTGTTCGACGGCATCGCCACCGGCCTGCTG
GTGCTGAAGGACCTGGGCATCCAGGTGGACCGGTACATCG
CCAGCGAGGTGTGCGAGGACAGCATCACCGTGGGCATGGT
GCGGCACCAGGGCAAGATCATGTACGTGGGCGACGTGCGG
AGCGTGACCCAGAAGCACATCCAGGAGTGGGGCCCCTTCG
ACCTGGTGATCGGCGGCAGCCCCTGCAACGACCTGAGCAT
CGTGAACCCCGCCCGGAAGGGCCTGTACGAGGGCACCGGC
CGGCTGTTCTTCGAGTTCTACCGGCTGCTGCACGACGCCC
GGCCCAAGGAGGGCGACGACCGGCCCTTCTTCTGGCTGTT
CGAGAACGTGGTGGCCATGGGCGTGAGCGACAAGCGGGAC
ATCAGCCGGTTCCTGGAGAGCAACCCCGTGATGATCGACG
CCAAGGAGGTGAGCGCCGCCCACCGGGCCCGGTACTTCTG
GGGCAACCTGCCCGGCATGAACCGGCCCCTGGCCAGCACC
GTGAACGACAAGCTGGAGCTGCAGGAGTGCCTGGAGCACG
GCCGGATCGCCAAGTTCAGCAAGGTGCGGACCATCACCAC
CCGGAGCAACAGCATCAAGCAGGGCAAGGACCAGCACTTC
CCCGTGTTCATGAACGAGAAGGAGGACATCCTGTGGTGCA
CCGAGATGGAGCGGGTGTTCGGCTTCCCCGTGCACTACAC
CGACGTGAGCAACATGAGCCGGCTGGCCCGGCAGCGGCTG
CTGGGCCGGAGCTGGAGCGTGCCCGTGATCCGGCACCTGT
TCGCCCCCCTGAAGGAGTACTTCGCCTGCGTGAGCAGCGG
CAACAGCAACGCCAACAGCCGGGGCCCCAGCTTCAGCAGC
GGCCTGGTGCCCCTGAGCCTGCGGGGCAGCCACATGAATC
CTCTGGAGATGTTCGAGACAGTGCCCGTGTGGAGAAGGCA
ACCCGTGAGGGTGCTGAGCCTCTTCGAGGACATTAAGAAG
GAGCTGACCTCTCTGGGCTTTCTGGAATCCGGCAGCGACC
CCGGCCAGCTGAAACACGTGGTGGACGTGACCGACACAGT
GAGGAAGGACGTGGAAGAGTGGGGCCCCTTTGACCTCGTG
TATGGAGCCACACCTCCTCTCGGCCACACATGCGATAGGC
CTCCCAGCTGGTATCTCTTCCAGTTCCACAGACTGCTCCA
GTACGCCAGACCTAAGCCCGGCAGCCCCAGACCCTTCTTC
TGGATGTTCGTGGACAATCTGGTGCTGAACAAGGAGGATC
TGGATGTGGCCAGCAGATTTCTGGAGATGGAACCCGTGAC
AATCCCCGACGTGCATGGCGGCTCTCTGCAGAACGCCGTG
AGAGTGTGGTCCAACATCCCCGCCATTAGAAGCAGACACT
GGGCTCTGGTGAGCGAGGAGGAACTGTCTCTGCTGGCCCA
GAATAAGCAGTCCTCCAAGCTGGCCGCCAAGTGGCCCACC
AAGCTGGTGAAGAACTGCTTTCTGCCTCTGAGGGAGTATT
TCAAGTATTTCAGCACCGAACTGACCAGCAGCCTGAGCGG
CGGCAAGCGGCCCGCCGCCACCAAGAAGGCCGGCCAGGCC
AAGAAGAAGAAGGGCAGCTACCCCTACGACGTGCCCGACT
ACGCCTGAGCGGCCGCTTAATTAAGCTGCCTTCTGCGGGG
CTTGCCTTCTGGCCATGCCCTTCTTCTCTCCCTTGCACCT
GTACCTCTTGGTCTTTGAATAAAGCCTGAGTAGGAAGTCT
AGAAAAAAAAAAAAAAAAAAAAAAAAAAAAAAAAAAAAAA
AAAAAAAAAAAAAAAAAAAAAAAAAAAAAAAAAAAAAAAA
AA
dCas9-DNMT3a/3L (m) (MR-28195)
(SEQ ID NO: 25)
AGGAAATAAGAGAGAAAAGAAGAGTAAGAAGAAATATAAG
AGCCACCATGGCCCCCAAGAAGAAGCGGAAGGTGGGCATC
CACGGCGTGCCCGCCGCCGACAAGAAGTACAGCATCGGCC
TGGCCATCGGCACCAACAGCGTGGGCTGGGCCGTGATCAC
CGACGAGTACAAGGTGCCCAGCAAGAAGTTCAAGGTGCTG
GGCAACACCGACCGGCACAGCATCAAGAAGAACCTGATCG
GCGCCCTGCTGTTCGACAGCGGCGAGACCGCCGAGGCCAC
CCGGCTGAAGCGGACCGCCCGGCGGCGGTACACCCGGCGG
AAGAACCGGATCTGCTACCTGCAGGAGATCTTCAGCAACG
AGATGGCCAAGGTGGACGACAGCTTCTTCCACCGGCTGGA
GGAGAGCTTCCTGGTGGAGGAGGACAAGAAGCACGAGCGG
CACCCCATCTTCGGCAACATCGTGGACGAGGTGGCCTACC
ACGAGAAGTACCCCACCATCTACCACCTGCGGAAGAAGCT
GGTGGACAGCACCGACAAGGCCGACCTGCGGCTGATCTAC
CTGGCCCTGGCCCACATGATCAAGTTCCGGGGCCACTTCC
TGATCGAGGGCGACCTGAACCCCGACAACAGCGACGTGGA
CAAGCTGTTCATCCAGCTGGTGCAGACCTACAACCAGCTG
TTCGAGGAGAACCCCATCAACGCCAGCGGCGTGGACGCCA
AGGCCATCCTGAGCGCCCGGCTGAGCAAGAGCCGGCGGCT
GGAGAACCTGATCGCCCAGCTGCCCGGCGAGAAGAAGAAC
GGCCTGTTCGGCAACCTGATCGCCCTGAGCCTGGGCCTGA
CCCCCAACTTCAAGAGCAACTTCGACCTGGCCGAGGACGC
CAAGCTGCAGCTGAGCAAGGACACCTACGACGACGACCTG
GACAACCTGCTGGCCCAGATCGGCGACCAGTACGCCGACC
TGTTCCTGGCCGCCAAGAACCTGAGCGACGCCATCCTGCT
GAGCGACATCCTGCGGGTGAACACCGAGATCACCAAGGCC
CCCCTGAGCGCCAGCATGATCAAGCGGTACGACGAGCACC
ACCAGGACCTGACCCTGCTGAAGGCCCTGGTGCGGCAGCA
GCTGCCCGAGAAGTACAAGGAGATCTTCTTCGACCAGAGC
AAGAACGGCTACGCCGGCTACATCGACGGCGGCGCCAGCC
AGGAGGAGTTCTACAAGTTCATCAAGCCCATCCTGGAGAA
GATGGACGGCACCGAGGAGCTGCTGGTGAAGCTGAACCGG
GAGGACCTGCTGCGGAAGCAGCGGACCTTCGACAACGGCA
GCATCCCCCACCAGATCCACCTGGGCGAGCTGCACGCCAT
CCTGCGGCGGCAGGAGGACTTCTACCCCTTCCTGAAGGAC
AACCGGGAGAAGATCGAGAAGATCCTGACCTTCCGGATCC
CCTACTACGTGGGCCCCCTGGCCCGGGGCAACAGCCGGTT
CGCCTGGATGACCCGGAAATCCGAGGAGACCATCACCCCC
TGGAACTTCGAGGAGGTGGTGGACAAGGGCGCCAGCGCCC
AGAGCTTCATCGAGCGGATGACCAACTTCGACAAGAACCT
GCCCAACGAGAAGGTGCTGCCCAAGCACAGCCTGCTGTAC
GAGTACTTCACCGTGTACAACGAGCTGACCAAGGTGAAGT
ACGTGACCGAGGGCATGCGGAAGCCCGCCTTCCTGAGCGG
CGAGCAGAAGAAGGCCATCGTGGACCTGCTGTTCAAGACC
AACCGGAAGGTGACCGTGAAGCAGCTGAAGGAGGACTACT
TCAAGAAGATCGAGTGCTTCGACAGCGTGGAGATCAGCGG
CGTGGAGGACCGGTTCAACGCCAGCCTGGGCACCTACCAC
GACCTGCTGAAGATCATCAAGGACAAGGACTTCCTGGACA
ACGAGGAGAACGAGGACATCCTGGAGGACATCGTGCTGAC
CCTGACCCTGTTCGAGGACCGGGAGATGATCGAGGAGCGG
CTGAAAACCTACGCCCACCTGTTCGACGACAAGGTGATGA
AGCAGCTGAAGCGGCGGCGGTACACCGGCTGGGGCCGGCT
GAGCCGGAAGCTGATCAACGGCATCCGGGACAAGCAGAGC
GGCAAGACCATCCTGGACTTCCTGAAATCCGACGGCTTCG
CCAACCGGAACTTCATGCAGCTGATCCACGACGACAGCCT
GACCTTCAAGGAGGACATCCAGAAGGCCCAGGTGAGCGGC
CAGGGCGACAGCCTGCACGAGCACATCGCCAACCTGGCCG
GCAGCCCCGCCATCAAGAAGGGCATCCTGCAGACCGTGAA
GGTGGTGGACGAGCTGGTGAAGGTGATGGGCCGGCACAAG
CCCGAGAACATCGTGATCGAGATGGCCCGGGAGAACCAGA
CCACCCAGAAGGGCCAGAAGAACAGCCGGGAGCGGATGAA
GCGGATCGAGGAGGGCATCAAGGAGCTGGGCAGCCAGATC
CTGAAGGAGCACCCCGTGGAGAACACCCAGCTGCAGAACG
AGAAGCTGTACCTGTACTACCTGCAGAACGGCCGGGACAT
GTACGTGGACCAGGAGCTGGACATCAACCGGCTGAGCGAC
TACGACGTGGCCGCCATCGTGCCCCAGAGCTTCCTGAAGG
ACGACAGCATCGACAACAAGGTGCTGACCCGGAGCGACAA
GGCCCGGGGCAAGAGCGACAACGTGCCCAGCGAGGAGGTG
GTGAAGAAGATGAAGAACTACTGGCGGCAGCTGCTGAACG
CCAAGCTGATCACCCAGCGGAAGTTCGACAACCTGACCAA
GGCCGAGCGGGGCGGCCTGAGCGAGCTGGACAAGGCCGGC
TTCATCAAGCGGCAGCTGGTGGAGACCCGGCAGATCACCA
AGCACGTGGCCCAGATCCTGGACAGCCGGATGAACACCAA
GTACGACGAGAACGACAAGCTGATCCGGGAGGTGAAGGTG
ATCACCCTGAAATCCAAGCTGGTGAGCGACTTCCGGAAGG
ACTTCCAGTTCTACAAGGTGCGGGAGATCAACAACTACCA
CCACGCCCACGACGCCTACCTGAACGCCGTGGTGGGCACC
GCCCTGATCAAGAAGTACCCCAAGCTGGAGAGCGAGTTCG
TGTACGGCGACTACAAGGTGTACGACGTGCGGAAGATGAT
CGCCAAGAGCGAGCAGGAGATCGGCAAGGCCACCGCCAAG
TACTTCTTCTACAGCAACATCATGAACTTCTTCAAGACCG
AGATCACCCTGGCCAACGGCGAGATCCGGAAGCGGCCCCT
GATCGAGACCAACGGCGAGACCGGCGAGATCGTGTGGGAC
AAGGGCCGGGACTTCGCCACCGTGCGGAAGGTGCTGAGCA
TGCCCCAGGTGAACATCGTGAAGAAAACCGAGGTGCAGAC
CGGCGGCTTCAGCAAGGAGAGCATCCTGCCCAAGCGGAAC
AGCGACAAGCTGATCGCCCGGAAGAAGGACTGGGACCCCA
AGAAGTACGGCGGCTTCGACAGCCCCACCGTGGCCTACAG
CGTGCTGGTGGTGGCCAAGGTGGAGAAGGGCAAGAGCAAG
AAGCTGAAATCCGTGAAGGAGCTGCTGGGCATCACCATCA
TGGAGCGGAGCAGCTTCGAGAAGAACCCCATCGACTTCCT
GGAGGCCAAGGGCTACAAGGAGGTGAAGAAGGACCTGATC
ATCAAGCTGCCCAAGTACAGCCTGTTCGAGCTGGAGAACG
GCCGGAAGCGGATGCTGGCCAGCGCCGGCGAGCTGCAGAA
GGGCAACGAGCTGGCCCTGCCCAGCAAGTACGTGAACTTC
CTGTACCTGGCCAGCCACTACGAGAAGCTGAAGGGCAGCC
CCGAGGACAACGAGCAGAAGCAGCTGTTCGTGGAGCAGCA
CAAGCACTACCTGGACGAGATCATCGAGCAGATCAGCGAG
TTCAGCAAGCGGGTGATCCTGGCCGACGCCAACCTGGACA
AGGTGCTGAGCGCCTACAACAAGCACCGGGACAAGCCCAT
CCGGGAGCAGGCCGAGAACATCATCCACCTGTTCACCCTG
ACCAACCTGGGCGCCCCCGCCGCCTTCAAGTACTTCGACA
CCACCATCGACCGGAAGCGGTACACCAGCACCAAGGAGGT
GCTGGACGCCACCCTGATCCACCAGAGCATCACCGGCCTG
TACGAGACCCGGATCGACCTGAGCCAGCTGGGCGGCGACA
GCGCCGGCGGCGGCGGCAGCGGCGGCGGCGGCAGCGGCGG
CGGCGGCAGCGGCCCCAAGAAGAAGCGGAAGGTGGCCGCC
GCCGGCAGCAACCACGACCAGGAGTTCGACCCCCCCAAGG
TGTACCCCCCCGTGCCCGCCGAGAAGCGGAAGCCCATCCG
GGTGCTGAGCCTGTTCGACGGCATCGCCACCGGCCTGCTG
GTGCTGAAGGACCTGGGCATCCAGGTGGACCGGTACATCG
CCAGCGAGGTGTGCGAGGACAGCATCACCGTGGGCATGGT
GCGGCACCAGGGCAAGATCATGTACGTGGGCGACGTGCGG
AGCGTGACCCAGAAGCACATCCAGGAGTGGGGCCCCTTCG
ACCTGGTGATCGGCGGCAGCCCCTGCAACGACCTGAGCAT
CGTGAACCCCGCCCGGAAGGGCCTGTACGAGGGCACCGGC
CGGCTGTTCTTCGAGTTCTACCGGCTGCTGCACGACGCCC
GGCCCAAGGAGGGCGACGACCGGCCCTTCTTCTGGCTGTT
CGAGAACGTGGTGGCCATGGGCGTGAGCGACAAGCGGGAC
ATCAGCCGGTTCCTGGAGAGCAACCCCGTGATGATCGACG
CCAAGGAGGTGAGCGCCGCCCACCGGGCCCGGTACTTCTG
GGGCAACCTGCCCGGCATGAACCGGCCCCTGGCCAGCACC
GTGAACGACAAGCTGGAGCTGCAGGAGTGCCTGGAGCACG
GCCGGATCGCCAAGTTCAGCAAGGTGCGGACCATCACCAC
CCGGAGCAACAGCATCAAGCAGGGCAAGGACCAGCACTTC
CCCGTGTTCATGAACGAGAAGGAGGACATCCTGTGGTGCA
CCGAGATGGAGCGGGTGTTCGGCTTCCCCGTGCACTACAC
CGACGTGAGCAACATGAGCCGGCTGGCCCGGCAGCGGCTG
CTGGGCCGGAGCTGGAGCGTGCCCGTGATCCGGCACCTGT
TCGCCCCCCTGAAGGAGTACTTCGCCTGCGTGAGCAGCGG
CAACAGCAACGCCAACAGCCGGGGCCCCAGCTTCAGCAGC
GGCCTGGTGCCCCTGAGCCTGCGGGGCAGCCACATGGGCC
CCATGGAGATCTACAAGACCGTGAGCGCCTGGAAGCGGCA
GCCCGTGCGGGTGCTGAGCCTGTTCCGGAACATCGACAAG
GTGCTGAAATCCCTGGGCTTCCTGGAGAGCGGCAGCGGCA
GCGGCGGCGGCACCCTGAAGTACGTGGAGGACGTGACCAA
CGTGGTGCGGCGGGACGTGGAGAAGTGGGGCCCCTTCGAC
CTGGTGTACGGCAGCACCCAGCCCCTGGGCAGCAGCTGCG
ACCGGTGCCCCGGCTGGTACATGTTCCAGTTCCACCGGAT
CCTGCAGTACGCCCTGCCCCGGCAGGAGAGCCAGCGGCCC
TTCTTCTGGATCTTCATGGACAACCTGCTGCTGACCGAGG
ACGACCAGGAGACCACCACCCGGTTCCTGCAGACCGAGGC
CGTGACCCTGCAGGACGTGCGGGGCCGGGACTACCAGAAC
GCCATGCGGGTGTGGAGCAACATCCCCGGCCTGAAATCCA
AGCACGCCCCCCTGACCCCCAAGGAGGAGGAGTACCTGCA
GGCCCAGGTGCGGAGCCGGAGCAAGCTGGACGCCCCCAAG
GTGGACCTGCTGGTGAAGAACTGCCTGCTGCCCCTGCGGG
AGTACTTCAAGTACTTCAGCCAGAACAGCCTGCCCCTGAG
CGGCGGCAAGCGGCCCGCCGCCACCAAGAAGGCCGGCCAG
GCCAAGAAGAAGAAGGGCAGCTACCCCTACGACGTGCCCG
ACTACGCCTGAGCGGCCGCTTAATTAAGCTGCCTTCTGCG
GGGCTTGCCTTCTGGCCATGCCCTTCTTCTCTCCCTTGCA
CCTGTACCTCTTGGTCTTTGAATAAAGCCTGAGTAGGAAG
TCTAGAAAAAAAAAAAAAAAAAAAAAAAAAAAAAAAAAAA
AAAAAAAAAAAAAAAAAAAAAAAAAAAAAAAAAAAAAAAA
AAAAA

[0567] In some embodiments, an expression repressor comprises the amino acid sequence of SEQ ID NOs: 35, 36, 70, or 71. In some embodiments, an expression repressor described herein comprises an amino acid sequence of SEQ ID NO: 35, 36, 70, or 71 or a sequence with at least 80, 85, 90, 95, 99, or 100% identity thereto, or having no more than 20, 19, 18, 17, 16, 15, 14, 13, 12, 11, 10, 9, 8, 7, 6, 5, 4, 3, 2, or 1 positions of difference thereto.

dCas9-DNMT3a/3L (h)
(SEQ ID NO: 35)
MAPKKKRKVGIHGVPAADKKYSIGLAIGTNSVGWAVITDE
YKVPSKKFKVLGNTDRHSIKKNLIGALLFDSGETAEATRL
KRTARRRYTRRKNRICYLQEIFSNEMAKVDDSFFHRLEES
FLVEEDKKHERHPIFGNIVDEVAYHEKYPTIYHLRKKLVD
STDKADLRLIYLALAHMIKFRGHFLIEGDLNPDNSDVDKL
FIQLVQTYNQLFEENPINASGVDAKAILSARLSKSRRLEN
LIAQLPGEKKNGLFGNLIALSLGLTPNFKSNFDLAEDAKL
QLSKDTYDDDLDNLLAQIGDQYADLFLAAKNLSDAILLSD
ILRVNTEITKAPLSASMIKRYDEHHQDLTLLKALVRQQLP
EKYKEIFFDQSKNGYAGYIDGGASQEEFYKFIKPILEKMD
GTEELLVKLNREDLLRKQRTFDNGSIPHQIHLGELHAILR
RQEDFYPFLKDNREKIEKILTFRIPYYVGPLARGNSRFAW
MTRKSEETITPWNFEEVVDKGASAQSFIERMTNFDKNLPN
EKVLPKHSLLYEYFTVYNELTKVKYVTEGMRKPAFLSGEQ
KKAIVDLLFKTNRKVTVKQLKEDYFKKIECFDSVEISGVE
DRFNASLGTYHDLLKIIKDKDFLDNEENEDILEDIVLTLT
LFEDREMIEERLKTYAHLFDDKVMKQLKRRRYTGWGRLSR
KLINGIRDKQSGKTILDFLKSDGFANRNFMQLIHDDSLTF
KEDIQKAQVSGQGDSLHEHIANLAGSPAIKKGILQTVKVV
DELVKVMGRHKPENIVIEMARENQTTQKGQKNSRERMKRI
EEGIKELGSQILKEHPVENTQLQNEKLYLYYLQNGRDMYV
DQELDINRLSDYDVAAIVPQSFLKDDSIDNKVLTRSDKAR
GKSDNVPSEEVVKKMKNYWRQLLNAKLITQRKFDNLTKAE
RGGLSELDKAGFIKRQLVETRQITKHVAQILDSRMNTKYD
ENDKLIREVKVITLKSKLVSDFRKDFQFYKVREINNYHHA
HDAYLNAVVGTALIKKYPKLESEFVYGDYKVYDVRKMIAK
SEQEIGKATAKYFFYSNIMNFFKTEITLANGEIRKRPLIE
TNGETGEIVWDKGRDFATVRKVLSMPQVNIVKKTEVQTGG
FSKESILPKRNSDKLIARKKDWDPKKYGGFDSPTVAYSVL
VVAKVEKGKSKKLKSVKELLGITIMERSSFEKNPIDFLEA
KGYKEVKKDLIIKLPKYSLFELENGRKRMLASAGELQKGN
ELALPSKYVNFLYLASHYEKLKGSPEDNEQKQLFVEQHKH
YLDEIIEQISEFSKRVILADANLDKVLSAYNKHRDKPIRE
QAENIIHLFTLTNLGAPAAFKYFDTTIDRKRYTSTKEVLD
ATLIHQSITGLYETRIDLSQLGGDSAGGGGSGGGGSGGGG
SGPKKKRKVAAAGSNHDQEFDPPKVYPPVPAEKRKPIRVL
SLFDGIATGLLVLKDLGIQVDRYIASEVCEDSITVGMVRH
QGKIMYVGDVRSVTQKHIQEWGPFDLVIGGSPCNDLSIVN
PARKGLYEGTGRLFFEFYRLLHDARPKEGDDRPFFWLFEN
VVAMGVSDKRDISRFLESNPVMIDAKEVSAAHRARYFWGN
LPGMNRPLASTVNDKLELQECLEHGRIAKFSKVRTITTRS
NSIKQGKDQHFPVFMNEKEDILWCTEMERVFGFPVHYTDV
SNMSRLARQRLLGRSWSVPVIRHLFAPLKEYFACVSSGNS
NANSRGPSFSSGLVPLSLRGSHMNPLEMFETVPVWRRQPV
RVLSLFEDIKKELTSLGFLESGSDPGQLKHVVDVTDTVRK
DVEEWGPFDLVYGATPPLGHTCDRPPSWYLFQFHRLLQYA
RPKPGSPRPFFWMFVDNLVLNKEDLDVASRFLEMEPVTIP
DVHGGSLQNAVRVWSNIPAIRSRHWALVSEEELSLLAQNK
QSSKLAAKWPTKLVKNCFLPLREYFKYFSTELTSSLSGGK
RPAATKKAGQAKKKKGSYPYDVPDYA
dCas9-DNMT3a/31 (m)
(SEQ ID NO: 36)
MAPKKKRKVGIHGVPAADKKYSIGLAIGTNSVGWAVITDE
YKVPSKKFKVLGNTDRHSIKKNLIGALLFDSGETAEATRL
KRTARRRYTRRKNRICYLQEIFSNEMAKVDDSFFHRLEES
FLVEEDKKHERHPIFGNIVDEVAYHEKYPTIYHLRKKLVD
STDKADLRLIYLALAHMIKFRGHFLIEGDLNPDNSDVDKL
FIQLVQTYNQLFEENPINASGVDAKAILSARLSKSRRLEN
LIAQLPGEKKNGLFGNLIALSLGLTPNFKSNFDLAEDAKL
QLSKDTYDDDLDNLLAQIGDQYADLFLAAKNLSDAILLSD
ILRVNTEITKAPLSASMIKRYDEHHQDLTLLKALVRQQLP
EKYKEIFFDQSKNGYAGYIDGGASQEEFYKFIKPILEKMD
GTEELLVKLNREDLLRKQRTFDNGSIPHQIHLGELHAILR
RQEDFYPFLKDNREKIEKILTFRIPYYVGPLARGNSRFAW
MTRKSEETITPWNFEEVVDKGASAQSFIERMTNFDKNLPN
EKVLPKHSLLYEYFTVYNELTKVKYVTEGMRKPAFLSGEQ
KKAIVDLLFKTNRKVTVKQLKEDYFKKIECFDSVEISGVE
DRFNASLGTYHDLLKIIKDKDFLDNEENEDILEDIVLTLT
LFEDREMIEERLKTYAHLFDDKVMKQLKRRRYTGWGRLSR
KLINGIRDKQSGKTILDFLKSDGFANRNFMQLIHDDSLTF
KEDIQKAQVSGQGDSLHEHIANLAGSPAIKKGILQTVKVV
DELVKVMGRHKPENIVIEMARENQTTQKGQKNSRERMKRI
EEGIKELGSQILKEHPVENTQLQNEKLYLYYLQNGRDMYV
DQELDINRLSDYDVAAIVPQSFLKDDSIDNKVLTRSDKAR
GKSDNVPSEEVVKKMKNYWRQLLNAKLITQRKFDNLTKAE
RGGLSELDKAGFIKRQLVETRQITKHVAQILDSRMNTKYD
ENDKLIREVKVITLKSKLVSDFRKDFQFYKVREINNYHHA
HDAYLNAVVGTALIKKYPKLESEFVYGDYKVYDVRKMIAK
SEQEIGKATAKYFFYSNIMNFFKTEITLANGEIRKRPLIE
TNGETGEIVWDKGRDFATVRKVLSMPQVNIVKKTEVQTGG
FSKESILPKRNSDKLIARKKDWDPKKYGGFDSPTVAYSVL
VVAKVEKGKSKKLKSVKELLGITIMERSSFEKNPIDFLEA
KGYKEVKKDLIIKLPKYSLFELENGRKRMLASAGELQKGN
ELALPSKYVNFLYLASHYEKLKGSPEDNEQKQLFVEQHKH
YLDEIIEQISEFSKRVILADANLDKVLSAYNKHRDKPIRE
QAENIIHLFTLTNLGAPAAFKYFDTTIDRKRYTSTKEVLD
ATLIHQSITGLYETRIDLSQLGGDSAGGGGSGGGGSGGGG
SGPKKKRKVAAAGSNHDQEFDPPKVYPPVPAEKRKPIRVL
SLFDGIATGLLVLKDLGIQVDRYIASEVCEDSITVGMVRH
QGKIMYVGDVRSVTQKHIQEWGPFDLVIGGSPCNDLSIVN
PARKGLYEGTGRLFFEFYRLLHDARPKEGDDRPFFWLFEN
VVAMGVSDKRDISRFLESNPVMIDAKEVSAAHRARYFWGN
LPGMNRPLASTVNDKLELQECLEHGRIAKFSKVRTITTRS
NSIKQGKDQHFPVFMNEKEDILWCTEMERVFGFPVHYTDV
SNMSRLARQRLLGRSWSVPVIRHLFAPLKEYFACVSSGNS
NANSRGPSFSSGLVPLSLRGSHMNPLEMFETVPVWRRQPV
RVLSLFEDIKKELTSLGFLESGSDPGQLKHVVDVTDTVRK
DVEEWGPFDLVYGATPPLGHTCDRPPSWYLFQFHRLLQYA
RPKPGSPRPFFWMFVDNLVLNKEDLDVASRFLEMEPVTIP
DVHGGSLQNAVRVWSNIPAIRSRHWALVSEEELSLLAQNK
QSSKLAAKWPTKLVKNCFLPLREYFKYFSTELTSSLSGGK
RPAATKKAGQAKKKKGSYPYDVPDYA
dCas-DNMT3a/3L (h) without HA tag
(SEQ ID NO: 70)
MAPKKKRKVGIHGVPAADKKYSIGLAIGTNSVGWAVITDE
YKVPSKKFKVLGNTDRHSIKKNLIGALLFDSGETAEATRL
KRTARRRYTRRKNRICYLQEIFSNEMAKVDDSFFHRLEES
FLVEEDKKHERHPIFGNIVDEVAYHEKYPTIYHLRKKLVD
STDKADLRLIYLALAHMIKFRGHFLIEGDLNPDNSDVDKL
FIQLVQTYNQLFEENPINASGVDAKAILSARLSKSRRLEN
LIAQLPGEKKNGLFGNLIALSLGLTPNFKSNFDLAEDAKL
QLSKDTYDDDLDNLLAQIGDQYADLFLAAKNLSDAILLSD
ILRVNTEITKAPLSASMIKRYDEHHQDLTLLKALVRQQLP
EKYKEIFFDQSKNGYAGYIDGGASQEEFYKFIKPILEKMD
GTEELLVKLNREDLLRKQRTFDNGSIPHQIHLGELHAILR
RQEDFYPFLKDNREKIEKILTFRIPYYVGPLARGNSRFAW
MTRKSEETITPWNFEEVVDKGASAQSFIERMTNFDKNLPN
EKVLPKHSLLYEYFTVYNELTKVKYVTEGMRKPAFLSGEQ
KKAIVDLLFKTNRKVTVKQLKEDYFKKIECFDSVEISGVE
DRFNASLGTYHDLLKIIKDKDFLDNEENEDILEDIVLTLT
LFEDREMIEERLKTYAHLFDDKVMKQLKRRRYTGWGRLSR
KLINGIRDKQSGKTILDFLKSDGFANRNFMQLIHDDSLTF
KEDIQKAQVSGQGDSLHEHIANLAGSPAIKKGILQTVKVV
DELVKVMGRHKPENIVIEMARENQTTQKGQKNSRERMKRI
EEGIKELGSQILKEHPVENTQLQNEKLYLYYLQNGRDMYV
DQELDINRLSDYDVAAIVPQSFLKDDSIDNKVLTRSDKAR
GKSDNVPSEEVVKKMKNYWRQLLNAKLITQRKFDNLTKAE
RGGLSELDKAGFIKRQLVETRQITKHVAQILDSRMNTKYD
ENDKLIREVKVITLKSKLVSDFRKDFQFYKVREINNYHHA
HDAYLNAVVGTALIKKYPKLESEFVYGDYKVYDVRKMIAK
SEQEIGKATAKYFFYSNIMNFFKTEITLANGEIRKRPLIE
TNGETGEIVWDKGRDFATVRKVLSMPQVNIVKKTEVQTGG
FSKESILPKRNSDKLIARKKDWDPKKYGGFDSPTVAYSVL
VVAKVEKGKSKKLKSVKELLGITIMERSSFEKNPIDFLEA
KGYKEVKKDLIIKLPKYSLFELENGRKRMLASAGELQKGN
ELALPSKYVNFLYLASHYEKLKGSPEDNEQKQLFVEQHKH
YLDEIIEQISEFSKRVILADANLDKVLSAYNKHRDKPIRE
QAENIIHLFTLTNLGAPAAFKYFDTTIDRKRYTSTKEVLD
ATLIHQSITGLYETRIDLSQLGGDSAGGGGSGGGGSGGGG
SGPKKKRKVAAAGSNHDQEFDPPKVYPPVPAEKRKPIRVL
SLFDGIATGLLVLKDLGIQVDRYIASEVCEDSITVGMVRH
QGKIMYVGDVRSVTQKHIQEWGPFDLVIGGSPCNDLSIVN
PARKGLYEGTGRLFFEFYRLLHDARPKEGDDRPFFWLFEN
VVAMGVSDKRDISRFLESNPVMIDAKEVSAAHRARYFWGN
LPGMNRPLASTVNDKLELQECLEHGRIAKFSKVRTITTRS
NSIKQGKDQHFPVFMNEKEDILWCTEMERVFGFPVHYTDV
SNMSRLARQRLLGRSWSVPVIRHLFAPLKEYFACVSSGNS
NANSRGPSFSSGLVPLSLRGSHMNPLEMFETVPVWRRQPV
RVLSLFEDIKKELTSLGFLESGSDPGQLKHVVDVTDTVRK
DVEEWGPFDLVYGATPPLGHTCDRPPSWYLFQFHRLLQYA
RPKPGSPRPFFWMFVDNLVLNKEDLDVASRFLEMEPVTIP
DVHGGSLQNAVRVWSNIPAIRSRHWALVSEEELSLLAQNK
QSSKLAAKWPTKLVKNCFLPLREYFKYFSTELTSSLSGGK
RPAATKKAGQAKKKKGS
dCas9-DNMT3a/3L (m) without HA tag
(SEQ ID NO: 71)
MAPKKKRKVGIHGVPAADKKYSIGLAIGTNSVGWAVITDE
YKVPSKKFKVLGNTDRHSIKKNLIGALLFDSGETAEATRL
KRTARRRYTRRKNRICYLQEIFSNEMAKVDDSFFHRLEES
FLVEEDKKHERHPIFGNIVDEVAYHEKYPTIYHLRKKLVD
STDKADLRLIYLALAHMIKFRGHFLIEGDLNPDNSDVDKL
FIQLVQTYNQLFEENPINASGVDAKAILSARLSKSRRLEN
LIAQLPGEKKNGLFGNLIALSLGLTPNFKSNFDLAEDAKL
QLSKDTYDDDLDNLLAQIGDQYADLFLAAKNLSDAILLSD
ILRVNTEITKAPLSASMIKRYDEHHQDLTLLKALVRQQLP
EKYKEIFFDQSKNGYAGYIDGGASQEEFYKFIKPILEKMD
GTEELLVKLNREDLLRKQRTFDNGSIPHQIHLGELHAILR
RQEDFYPFLKDNREKIEKILTFRIPYYVGPLARGNSRFAW
MTRKSEETITPWNFEEVVDKGASAQSFIERMTNFDKNLPN
EKVLPKHSLLYEYFTVYNELTKVKYVTEGMRKPAFLSGEQ
KKAIVDLLFKTNRKVTVKQLKEDYFKKIECFDSVEISGVE
DRFNASLGTYHDLLKIIKDKDFLDNEENEDILEDIVLTLT
LFEDREMIEERLKTYAHLFDDKVMKQLKRRRYTGWGRLSR
KLINGIRDKQSGKTILDFLKSDGFANRNFMQLIHDDSLTF
KEDIQKAQVSGQGDSLHEHIANLAGSPAIKKGILQTVKVV
DELVKVMGRHKPENIVIEMARENQTTQKGQKNSRERMKRI
EEGIKELGSQILKEHPVENTQLQNEKLYLYYLQNGRDMYV
DQELDINRLSDYDVAAIVPQSFLKDDSIDNKVLTRSDKAR
GKSDNVPSEEVVKKMKNYWRQLLNAKLITQRKFDNLTKAE
RGGLSELDKAGFIKRQLVETRQITKHVAQILDSRMNTKYD
ENDKLIREVKVITLKSKLVSDFRKDFQFYKVREINNYHHA
HDAYLNAVVGTALIKKYPKLESEFVYGDYKVYDVRKMIAK
SEQEIGKATAKYFFYSNIMNFFKTEITLANGEIRKRPLIE
TNGETGEIVWDKGRDFATVRKVLSMPQVNIVKKTEVQTGG
FSKESILPKRNSDKLIARKKDWDPKKYGGFDSPTVAYSVL
VVAKVEKGKSKKLKSVKELLGITIMERSSFEKNPIDFLEA
KGYKEVKKDLIIKLPKYSLFELENGRKRMLASAGELQKGN
ELALPSKYVNFLYLASHYEKLKGSPEDNEQKQLFVEQHKH
YLDEIIEQISEFSKRVILADANLDKVLSAYNKHRDKPIRE
QAENIIHLFTLTNLGAPAAFKYFDTTIDRKRYTSTKEVLD
ATLIHQSITGLYETRIDLSQLGGDSAGGGGSGGGGSGGGG
SGPKKKRKVAAAGSNHDQEFDPPKVYPPVPAEKRKPIRVL
SLFDGIATGLLVLKDLGIQVDRYIASEVCEDSITVGMVRH
QGKIMYVGDVRSVTQKHIQEWGPFDLVIGGSPCNDLSIVN
PARKGLYEGTGRLFFEFYRLLHDARPKEGDDRPFFWLFEN
VVAMGVSDKRDISRFLESNPVMIDAKEVSAAHRARYFWGN
LPGMNRPLASTVNDKLELQECLEHGRIAKFSKVRTITTRS
NSIKQGKDQHFPVFMNEKEDILWCTEMERVFGFPVHYTDV
SNMSRLARQRLLGRSWSVPVIRHLFAPLKEYFACVSSGNS
NANSRGPSFSSGLVPLSLRGSHMNPLEMFETVPVWRRQPV
RVLSLFEDIKKELTSLGFLESGSDPGQLKHVVDVTDTVRK
DVEEWGPFDLVYGATPPLGHTCDRPPSWYLFQFHRLLQYA
RPKPGSPRPFFWMFVDNLVLNKEDLDVASRFLEMEPVTIP
DVHGGSLQNAVRVWSNIPAIRSRHWALVSEEELSLLAQNK
QSSKLAAKWPTKLVKNCFLPLREYFKYFSTELTSSLSGGK
RPAATKKAGQAKKKKGS

[0568] In some embodiments, an expression repressor comprises a DNA-targeting moiety comprising dCas9, e.g., an S. pyogenes dCas9, and a repressor domain comprising G9A, e.g., a G9A domain. In some embodiments, the expression repressor is encoded by the nucleic acid sequence of SEQ ID NOs: 26 (e.g., a nucleic acid (e.g., cDNA) encoding the expression repressor). In some embodiments, a nucleic acid described herein comprises a nucleic acid sequence of SEQ ID NO: 26 or a sequence with at least 80, 85, 90, 95, 99, or 100% identity thereto, or having no more than 20, 19, 18, 17, 16, 15, 14, 13, 12, 11, 10, 9, 8, 7, 6, 5, 4, 3, 2, or 1 positions of difference thereto.

G9A-dCas9 (MR-29387)
(SEQ ID NO: 26)
AGGAAATAAGAGAGAAAAGAAGAGTAAGAAGAAATATAAG
AGCCACCATGGCCCCCAAGAAGAAGCGGAAGGTGGGCATC
CACGGCGTGCCCGCCGCCTCGGGCGGGGGTGGCTCAGGAA
ATAGGGCTATCAGAACCGAGAAGATCATCTGTAGGGACGT
GGCTAGAGGCTACGAGAACGTGCCCATTCCTTGCGTGAAT
GGCGTGGATGGCGAACCTTGCCCCGAGGACTACAAATACA
TCTCCGAGAACTGCGAAACCAGCACAATGAACATCGACAG
AAACATCACCCACCTCCAGCACTGCACATGTGTGGATGAC
TGCTCCTCCAGCAACTGTCTGTGCGGCCAGCTCTCCATCA
GATGCTGGTACGACAAGGACGGCAGACTGCTGCAAGAGTT
CAACAAGATCGAACCCCCTCTCATCTTCGAGTGTAACCAA
GCTTGCAGCTGCTGGAGAAACTGCAAGAATAGAGTGGTCC
AGAGCGGCATCAAGGTGAGACTGCAACTGTACAGAACCGC
CAAGATGGGATGGGGAGTGAGGGCTCTGCAAACCATTCCC
CAAGGCACCTTCATCTGCGAATACGTGGGCGAACTGATCT
CCGACGCCGAAGCTGACGTGAGAGAGGACGACAGCTATCT
CTTCGATCTGGACAATAAGGACGGCGAGGTGTACTGCATC
GACGCTAGATATTACGGCAACATCTCTAGATTCATCAACC
ACCTCTGCGATCCCAACATCATTCCCGTGAGGGTGTTCAT
GCTGCACCAAGATCTGAGGTTCCCTAGAATCGCCTTCTTC
AGCTCTAGAGACATCAGAACCGGCGAGGAGCTGGGCTTCG
ATTACGGCGATAGATTCTGGGACATCAAGTCCAAGTACTT
CACATGCCAGTGCGGCAGCGAGAAGTGTAAGCACAGCGCT
GAGGCCATTGCTCTGGAGCAGTCTAGACTGGCCAGACTGG
ATGGAGGTGGCGGATCGGGAGACAAGAAGTACAGCATCGG
CCTGGCCATCGGCACCAACAGCGTGGGCTGGGCCGTGATC
ACCGACGAGTACAAGGTGCCCAGCAAGAAGTTCAAGGTGC
TGGGCAACACCGACCGGCACAGCATCAAGAAGAACCTGAT
CGGCGCCCTGCTGTTCGACAGCGGCGAGACCGCCGAGGCC
ACCCGGCTGAAGCGGACCGCCCGGCGGCGGTACACCCGGC
GGAAGAACCGGATCTGCTACCTGCAGGAGATCTTCAGCAA
CGAGATGGCCAAGGTGGACGACAGCTTCTTCCACCGGCTG
GAGGAGAGCTTCCTGGTGGAGGAGGACAAGAAGCACGAGC
GGCACCCCATCTTCGGCAACATCGTGGACGAGGTGGCCTA
CCACGAGAAGTACCCCACCATCTACCACCTGCGGAAGAAG
CTGGTGGACAGCACCGACAAGGCCGACCTGCGGCTGATCT
ACCTGGCCCTGGCCCACATGATCAAGTTCCGGGGCCACTT
CCTGATCGAGGGCGACCTGAACCCCGACAACAGCGACGTG
GACAAGCTGTTCATCCAGCTGGTGCAGACCTACAACCAGC
TGTTCGAGGAGAACCCCATCAACGCCAGCGGCGTGGACGC
CAAGGCCATCCTGAGCGCCCGGCTGAGCAAGAGCCGGCGG
CTGGAGAACCTGATCGCCCAGCTGCCCGGCGAGAAGAAGA
ACGGCCTGTTCGGCAACCTGATCGCCCTGAGCCTGGGCCT
GACCCCCAACTTCAAGAGCAACTTCGACCTGGCCGAGGAC
GCCAAGCTGCAGCTGAGCAAGGACACCTACGACGACGACC
TGGACAACCTGCTGGCCCAGATCGGCGACCAGTACGCCGA
CCTGTTCCTGGCCGCCAAGAACCTGAGCGACGCCATCCTG
CTGAGCGACATCCTGCGGGTGAACACCGAGATCACCAAGG
CCCCCCTGAGCGCCAGCATGATCAAGCGGTACGACGAGCA
CCACCAGGACCTGACCCTGCTGAAGGCCCTGGTGCGGCAG
CAGCTGCCCGAGAAGTACAAGGAGATCTTCTTCGACCAGA
GCAAGAACGGCTACGCCGGCTACATCGACGGCGGCGCCAG
CCAGGAGGAGTTCTACAAGTTCATCAAGCCCATCCTGGAG
AAGATGGACGGCACCGAGGAGCTGCTGGTGAAGCTGAACC
GGGAGGACCTGCTGCGGAAGCAGCGGACCTTCGACAACGG
CAGCATCCCCCACCAGATCCACCTGGGCGAGCTGCACGCC
ATCCTGCGGCGGCAGGAGGACTTCTACCCCTTCCTGAAGG
ACAACCGGGAGAAGATCGAGAAGATCCTGACCTTCCGGAT
CCCCTACTACGTGGGCCCCCTGGCCCGGGGCAACAGCCGG
TTCGCCTGGATGACCCGGAAATCCGAGGAGACCATCACCC
CCTGGAACTTCGAGGAGGTGGTGGACAAGGGCGCCAGCGC
CCAGAGCTTCATCGAGCGGATGACCAACTTCGACAAGAAC
CTGCCCAACGAGAAGGTGCTGCCCAAGCACAGCCTGCTGT
ACGAGTACTTCACCGTGTACAACGAGCTGACCAAGGTGAA
GTACGTGACCGAGGGCATGCGGAAGCCCGCCTTCCTGAGC
GGCGAGCAGAAGAAGGCCATCGTGGACCTGCTGTTCAAGA
CCAACCGGAAGGTGACCGTGAAGCAGCTGAAGGAGGACTA
CTTCAAGAAGATCGAGTGCTTCGACAGCGTGGAGATCAGC
GGCGTGGAGGACCGGTTCAACGCCAGCCTGGGCACCTACC
ACGACCTGCTGAAGATCATCAAGGACAAGGACTTCCTGGA
CAACGAGGAGAACGAGGACATCCTGGAGGACATCGTGCTG
ACCCTGACCCTGTTCGAGGACCGGGAGATGATCGAGGAGC
GGCTGAAAACCTACGCCCACCTGTTCGACGACAAGGTGAT
GAAGCAGCTGAAGCGGCGGCGGTACACCGGCTGGGGCCGG
CTGAGCCGGAAGCTGATCAACGGCATCCGGGACAAGCAGA
GCGGCAAGACCATCCTGGACTTCCTGAAATCCGACGGCTT
CGCCAACCGGAACTTCATGCAGCTGATCCACGACGACAGC
CTGACCTTCAAGGAGGACATCCAGAAGGCCCAGGTGAGCG
GCCAGGGCGACAGCCTGCACGAGCACATCGCCAACCTGGC
CGGCAGCCCCGCCATCAAGAAGGGCATCCTGCAGACCGTG
AAGGTGGTGGACGAGCTGGTGAAGGTGATGGGCCGGCACA
AGCCCGAGAACATCGTGATCGAGATGGCCCGGGAGAACCA
GACCACCCAGAAGGGCCAGAAGAACAGCCGGGAGCGGATG
AAGCGGATCGAGGAGGGCATCAAGGAGCTGGGCAGCCAGA
TCCTGAAGGAGCACCCCGTGGAGAACACCCAGCTGCAGAA
CGAGAAGCTGTACCTGTACTACCTGCAGAACGGCCGGGAC
ATGTACGTGGACCAGGAGCTGGACATCAACCGGCTGAGCG
ACTACGACGTGGCCGCCATCGTGCCCCAGAGCTTCCTGAA
GGACGACAGCATCGACAACAAGGTGCTGACCCGGAGCGAC
AAGGCCCGGGGCAAGAGCGACAACGTGCCCAGCGAGGAGG
TGGTGAAGAAGATGAAGAACTACTGGCGGCAGCTGCTGAA
CGCCAAGCTGATCACCCAGCGGAAGTTCGACAACCTGACC
AAGGCCGAGCGGGGCGGCCTGAGCGAGCTGGACAAGGCCG
GCTTCATCAAGCGGCAGCTGGTGGAGACCCGGCAGATCAC
CAAGCACGTGGCCCAGATCCTGGACAGCCGGATGAACACC
AAGTACGACGAGAACGACAAGCTGATCCGGGAGGTGAAGG
TGATCACCCTGAAATCCAAGCTGGTGAGCGACTTCCGGAA
GGACTTCCAGTTCTACAAGGTGCGGGAGATCAACAACTAC
CACCACGCCCACGACGCCTACCTGAACGCCGTGGTGGGCA
CCGCCCTGATCAAGAAGTACCCCAAGCTGGAGAGCGAGTT
CGTGTACGGCGACTACAAGGTGTACGACGTGCGGAAGATG
ATCGCCAAGAGCGAGCAGGAGATCGGCAAGGCCACCGCCA
AGTACTTCTTCTACAGCAACATCATGAACTTCTTCAAGAC
CGAGATCACCCTGGCCAACGGCGAGATCCGGAAGCGGCCC
CTGATCGAGACCAACGGCGAGACCGGCGAGATCGTGTGGG
ACAAGGGCCGGGACTTCGCCACCGTGCGGAAGGTGCTGAG
CATGCCCCAGGTGAACATCGTGAAGAAAACCGAGGTGCAG
ACCGGCGGCTTCAGCAAGGAGAGCATCCTGCCCAAGCGGA
ACAGCGACAAGCTGATCGCCCGGAAGAAGGACTGGGACCC
CAAGAAGTACGGCGGCTTCGACAGCCCCACCGTGGCCTAC
AGCGTGCTGGTGGTGGCCAAGGTGGAGAAGGGCAAGAGCA
AGAAGCTGAAATCCGTGAAGGAGCTGCTGGGCATCACCAT
CATGGAGCGGAGCAGCTTCGAGAAGAACCCCATCGACTTC
CTGGAGGCCAAGGGCTACAAGGAGGTGAAGAAGGACCTGA
TCATCAAGCTGCCCAAGTACAGCCTGTTCGAGCTGGAGAA
CGGCCGGAAGCGGATGCTGGCCAGCGCCGGCGAGCTGCAG
AAGGGCAACGAGCTGGCCCTGCCCAGCAAGTACGTGAACT
TCCTGTACCTGGCCAGCCACTACGAGAAGCTGAAGGGCAG
CCCCGAGGACAACGAGCAGAAGCAGCTGTTCGTGGAGCAG
CACAAGCACTACCTGGACGAGATCATCGAGCAGATCAGCG
AGTTCAGCAAGCGGGTGATCCTGGCCGACGCCAACCTGGA
CAAGGTGCTGAGCGCCTACAACAAGCACCGGGACAAGCCC
ATCCGGGAGCAGGCCGAGAACATCATCCACCTGTTCACCC
TGACCAACCTGGGCGCCCCCGCCGCCTTCAAGTACTTCGA
CACCACCATCGACCGGAAGCGGTACACCAGCACCAAGGAG
GTGCTGGACGCCACCCTGATCCACCAGAGCATCACCGGCC
TGTACGAGACCCGGATCGACCTGAGCCAGCTGGGCGGCGA
CAGCGGCGGCAAGCGGCCCGCCGCCACCAAGAAGGCCGGC
CAGGCCAAGAAGAAGAAGGGCAGCTACCCCTACGACGTGC
CCGACTACGCCTGAGCGGCCGCTTAATTAAGCTGCCTTCT
GCGGGGCTTGCCTTCTGGCCATGCCCTTCTTCTCTCCCTT
GCACCTGTACCTCTTGGTCTTTGAATAAAGCCTGAGTAGG
AAGTCTAGAAAAAAAAAAAAAAAAAAAAAAAAAAAAAAAA
AAAAAAAAAAAAAAAAAAAAAAAAAAAAAAAAAAAAAAAA
AAAAAAAA

[0569] In some embodiments, an expression repressor comprises the amino acid sequence of SEQ ID NOs: 38 or 73. In some embodiments, an expression repressor described herein comprises an amino acid sequence of SEQ ID NO: 38 or 73 or a sequence with at least 80, 85, 90, 95, 99, or 100% identity thereto, or having no more than 20, 19, 18, 17, 16, 15, 14, 13, 12, 11, 10, 9, 8, 7, 6, 5, 4, 3, 2, or 1 positions of difference thereto.

G9a-dCas9
(SEQ ID NO: 38)
MAPKKKRKVGIHGVPAASGGGGSGNRAIRTEKIICRDVAR
GYENVPIPCVNGVDGEPCPEDYKYISENCETSTMNIDRNI
THLQHCTCVDDCSSSNCLCGQLSIRCWYDKDGRLLQEFNK
IEPPLIFECNQACSCWRNCKNRVVQSGIKVRLQLYRTAKM
GWGVRALQTIPQGTFICEYVGELISDAEADVREDDSYLFD
LDNKDGEVYCIDARYYGNISRFINHLCDPNIIPVRVFMLH
QDLRFPRIAFFSSRDIRTGEELGFDYGDRFWDIKSKYFTC
QCGSEKCKHSAEAIALEQSRLARLDGGGGSGDKKYSIGLA
IGTNSVGWAVITDEYKVPSKKFKVLGNTDRHSIKKNLIGA
LLFDSGETAEATRLKRTARRRYTRRKNRICYLQEIFSNEM
AKVDDSFFHRLEESFLVEEDKKHERHPIFGNIVDEVAYHE
KYPTIYHLRKKLVDSTDKADLRLIYLALAHMIKFRGHFLI
EGDLNPDNSDVDKLFIQLVQTYNQLFEENPINASGVDAKA
ILSARLSKSRRLENLIAQLPGEKKNGLFGNLIALSLGLTP
NFKSNFDLAEDAKLQLSKDTYDDDLDNLLAQIGDQYADLF
LAAKNLSDAILLSDILRVNTEITKAPLSASMIKRYDEHHQ
DLTLLKALVRQQLPEKYKEIFFDQSKNGYAGYIDGGASQE
EFYKFIKPILEKMDGTEELLVKLNREDLLRKQRTFDNGSI
PHQIHLGELHAILRRQEDFYPFLKDNREKIEKILTFRIPY
YVGPLARGNSRFAWMTRKSEETITPWNFEEVVDKGASAQS
FIERMTNFDKNLPNEKVLPKHSLLYEYFTVYNELTKVKYV
TEGMRKPAFLSGEQKKAIVDLLFKTNRKVTVKQLKEDYFK
KIECFDSVEISGVEDRFNASLGTYHDLLKIIKDKDFLDNE
ENEDILEDIVLTLTLFEDREMIEERLKTYAHLFDDKVMKQ
LKRRRYTGWGRLSRKLINGIRDKQSGKTILDFLKSDGFAN
RNFMQLIHDDSLTFKEDIQKAQVSGQGDSLHEHIANLAGS
PAIKKGILQTVKVVDELVKVMGRHKPENIVIEMARENQTT
QKGQKNSRERMKRIEEGIKELGSQILKEHPVENTQLQNEK
LYLYYLQNGRDMYVDQELDINRLSDYDVAAIVPQSFLKDD
SIDNKVLTRSDKARGKSDNVPSEEVVKKMKNYWRQLLNAK
LITQRKFDNLTKAERGGLSELDKAGFIKRQLVETRQITKH
VAQILDSRMNTKYDENDKLIREVKVITLKSKLVSDFRKDF
QFYKVREINNYHHAHDAYLNAVVGTALIKKYPKLESEFVY
GDYKVYDVRKMIAKSEQEIGKATAKYFFYSNIMNFFKTEI
TLANGEIRKRPLIETNGETGEIVWDKGRDFATVRKVLSMP
QVNIVKKTEVQTGGFSKESILPKRNSDKLIARKKDWDPKK
YGGFDSPTVAYSVLVVAKVEKGKSKKLKSVKELLGITIME
RSSFEKNPIDFLEAKGYKEVKKDLIIKLPKYSLFELENGR
KRMLASAGELQKGNELALPSKYVNFLYLASHYEKLKGSPE
DNEQKQLFVEQHKHYLDEIIEQISEFSKRVILADANLDKV
LSAYNKHRDKPIREQAENIIHLFTLTNLGAPAAFKYFDTT
IDRKRYTSTKEVLDATLIHQSITGLYETRIDLSQLGGDSG
GKRPAATKKAGQAKKKKGSYPYDVPDYA
G9A-dCas9 without HA tag
(SEQ ID NO: 73)
MAPKKKRKVGIHGVPAASGGGGSGNRAIRTEKIICRDVAR
GYENVPIPCVNGVDGEPCPEDYKYISENCETSTMNIDRNI
THLQHCTCVDDCSSSNCLCGQLSIRCWYDKDGRLLQEFNK
IEPPLIFECNQACSCWRNCKNRVVQSGIKVRLOLYRTAKM
GWGVRALQTIPQGTFICEYVGELISDAEADVREDDSYLFD
LDNKDGEVYCIDARYYGNISRFINHLCDPNIIPVRVFMLH
QDLRFPRIAFFSSRDIRTGEELGFDYGDRFWDIKSKYFTC
QCGSEKCKHSAEAIALEQSRLARLDGGGGSGDKKYSIGLA
IGTNSVGWAVITDEYKVPSKKFKVLGNTDRHSIKKNLIGA
LLFDSGETAEATRLKRTARRRYTRRKNRICYLQEIFSNEM
AKVDDSFFHRLEESFLVEEDKKHERHPIFGNIVDEVAYHE
KYPTIYHLRKKLVDSTDKADLRLIYLALAHMIKFRGHFLI
EGDLNPDNSDVDKLFIQLVQTYNQLFEENPINASGVDAKA
ILSARLSKSRRLENLIAQLPGEKKNGLFGNLIALSLGLTP
NFKSNFDLAEDAKLQLSKDTYDDDLDNLLAQIGDQYADLF
LAAKNLSDAILLSDILRVNTEITKAPLSASMIKRYDEHHQ
DLTLLKALVRQQLPEKYKEIFFDQSKNGYAGYIDGGASQE
EFYKFIKPILEKMDGTEELLVKLNREDLLRKQRTFDNGSI
PHQIHLGELHAILRRQEDFYPFLKDNREKIEKILTFRIPY
YVGPLARGNSRFAWMTRKSEETITPWNFEEVVDKGASAQS
FIERMTNFDKNLPNEKVLPKHSLLYEYFTVYNELTKVKYV
TEGMRKPAFLSGEQKKAIVDLLFKTNRKVTVKQLKEDYFK
KIECFDSVEISGVEDRFNASLGTYHDLLKIIKDKDFLDNE
ENEDILEDIVLTLTLFEDREMIEERLKTYAHLFDDKVMKQ
LKRRRYTGWGRLSRKLINGIRDKQSGKTILDFLKSDGFAN
RNFMQLIHDDSLTFKEDIQKAQVSGQGDSLHEHIANLAGS
PAIKKGILQTVKVVDELVKVMGRHKPENIVIEMARENQTT
QKGQKNSRERMKRIEEGIKELGSQILKEHPVENTQLQNEK
LYLYYLQNGRDMYVDQELDINRLSDYDVAAIVPQSFLKDD
SIDNKVLTRSDKARGKSDNVPSEEVVKKMKNYWRQLLNAK
LITQRKFDNLTKAERGGLSELDKAGFIKRQLVETRQITKH
VAQILDSRMNTKYDENDKLIREVKVITLKSKLVSDFRKDF
QFYKVREINNYHHAHDAYLNAVVGTALIKKYPKLESEFVY
GDYKVYDVRKMIAKSEQEIGKATAKYFFYSNIMNFFKTEI
TLANGEIRKRPLIETNGETGEIVWDKGRDFATVRKVLSMP
QVNIVKKTEVQTGGFSKESILPKRNSDKLIARKKDWDPKK
YGGFDSPTVAYSVLVVAKVEKGKSKKLKSVKELLGITIME
RSSFEKNPIDFLEAKGYKEVKKDLIIKLPKYSLFELENGR
KRMLASAGELQKGNELALPSKYVNFLYLASHYEKLKGSPE
DNEQKQLFVEQHKHYLDEIIEQISEFSKRVILADANLDKV
LSAYNKHRDKPIREQAENIIHLFTLTNLGAPAAFKYFDTT
IDRKRYTSTKEVLDATLIHQSITGLYETRIDLSQLGGDSG
GKRPAATKKAGQAKKKKGS

[0570] In some embodiments, an expression repressor comprises a DNA-targeting moiety comprising dCas9, e.g., an S. pyogenes dCas9, and a repressor domain comprising HDAC8, e.g., a HDAC8 domain. In some embodiments, the expression repressor is encoded by the nucleic acid sequence of SEQ ID NOs: 27 (e.g., a nucleic acid (e.g., cDNA) encoding the expression repressor). In some embodiments, a nucleic acid described herein comprises a nucleic acid sequence of SEQ ID NO: 27 or a sequence with at least 80, 85, 90, 95, 99, or 100% identity thereto, or having no more than 20, 19, 18, 17, 16, 15, 14, 13, 12, 11, 10, 9, 8, 7, 6, 5, 4, 3, 2, or 1 positions of difference thereto.

dCas9-HDAC8 (MR-29439)
(SEQ ID NO: 27)
AGGAAATAAGAGAGAAAAGAAGAGTAAGAAGAAATATAAGAGCCACCATGGCCCCCAAGA
AGAAGCGGAAGGTGGGCATCCACGGCGTGCCCGCCGCCGACAAGAAGTACAGCATCGGCCT
GGCCATCGGCACCAACAGCGTGGGCTGGGCCGTGATCACCGACGAGTACAAGGTGCCCAGC
AAGAAGTTCAAGGTGCTGGGCAACACCGACCGGCACAGCATCAAGAAGAACCTGATCGGCG
CCCTGCTGTTCGACAGCGGCGAGACCGCCGAGGCCACCCGGCTGAAGCGGACCGCCCGGCG
GCGGTACACCCGGCGGAAGAACCGGATCTGCTACCTGCAGGAGATCTTCAGCAACGAGATG
GCCAAGGTGGACGACAGCTTCTTCCACCGGCTGGAGGAGAGCTTCCTGGTGGAGGAGGACA
AGAAGCACGAGCGGCACCCCATCTTCGGCAACATCGTGGACGAGGTGGCCTACCACGAGAA
GTACCCCACCATCTACCACCTGCGGAAGAAGCTGGTGGACAGCACCGACAAGGCCGACCTG
CGGCTGATCTACCTGGCCCTGGCCCACATGATCAAGTTCCGGGGCCACTTCCTGATCGAGGG
CGACCTGAACCCCGACAACAGCGACGTGGACAAGCTGTTCATCCAGCTGGTGCAGACCTAC
AACCAGCTGTTCGAGGAGAACCCCATCAACGCCAGCGGCGTGGACGCCAAGGCCATCCTGA
GCGCCCGGCTGAGCAAGAGCCGGCGGCTGGAGAACCTGATCGCCCAGCTGCCCGGCGAGAA
GAAGAACGGCCTGTTCGGCAACCTGATCGCCCTGAGCCTGGGCCTGACCCCCAACTTCAAGA
GCAACTTCGACCTGGCCGAGGACGCCAAGCTGCAGCTGAGCAAGGACACCTACGACGACGA
CCTGGACAACCTGCTGGCCCAGATCGGCGACCAGTACGCCGACCTGTTCCTGGCCGCCAAGA
ACCTGAGCGACGCCATCCTGCTGAGCGACATCCTGCGGGTGAACACCGAGATCACCAAGGC
CCCCCTGAGCGCCAGCATGATCAAGCGGTACGACGAGCACCACCAGGACCTGACCCTGCTG
AAGGCCCTGGTGCGGCAGCAGCTGCCCGAGAAGTACAAGGAGATCTTCTTCGACCAGAGCA
AGAACGGCTACGCCGGCTACATCGACGGCGGCGCCAGCCAGGAGGAGTTCTACAAGTTCAT
CAAGCCCATCCTGGAGAAGATGGACGGCACCGAGGAGCTGCTGGTGAAGCTGAACCGGGAG
GACCTGCTGCGGAAGCAGCGGACCTTCGACAACGGCAGCATCCCCCACCAGATCCACCTGG
GCGAGCTGCACGCCATCCTGCGGCGGCAGGAGGACTTCTACCCCTTCCTGAAGGACAACCG
GGAGAAGATCGAGAAGATCCTGACCTTCCGGATCCCCTACTACGTGGGCCCCCTGGCCCGGG
GCAACAGCCGGTTCGCCTGGATGACCCGGAAATCCGAGGAGACCATCACCCCCTGGAACTT
CGAGGAGGTGGTGGACAAGGGCGCCAGCGCCCAGAGCTTCATCGAGCGGATGACCAACTTC
GACAAGAACCTGCCCAACGAGAAGGTGCTGCCCAAGCACAGCCTGCTGTACGAGTACTTCA
CCGTGTACAACGAGCTGACCAAGGTGAAGTACGTGACCGAGGGCATGCGGAAGCCCGCCTT
CCTGAGCGGCGAGCAGAAGAAGGCCATCGTGGACCTGCTGTTCAAGACCAACCGGAAGGTG
ACCGTGAAGCAGCTGAAGGAGGACTACTTCAAGAAGATCGAGTGCTTCGACAGCGTGGAGA
TCAGCGGCGTGGAGGACCGGTTCAACGCCAGCCTGGGCACCTACCACGACCTGCTGAAGAT
CATCAAGGACAAGGACTTCCTGGACAACGAGGAGAACGAGGACATCCTGGAGGACATCGTG
CTGACCCTGACCCTGTTCGAGGACCGGGAGATGATCGAGGAGCGGCTGAAAACCTACGCCC
ACCTGTTCGACGACAAGGTGATGAAGCAGCTGAAGCGGCGGCGGTACACCGGCTGGGGCCG
GCTGAGCCGGAAGCTGATCAACGGCATCCGGGACAAGCAGAGCGGCAAGACCATCCTGGAC
TTCCTGAAATCCGACGGCTTCGCCAACCGGAACTTCATGCAGCTGATCCACGACGACAGCCT
GACCTTCAAGGAGGACATCCAGAAGGCCCAGGTGAGCGGCCAGGGCGACAGCCTGCACGAG
CACATCGCCAACCTGGCCGGCAGCCCCGCCATCAAGAAGGGCATCCTGCAGACCGTGAAGG
TGGTGGACGAGCTGGTGAAGGTGATGGGCCGGCACAAGCCCGAGAACATCGTGATCGAGAT
GGCCCGGGAGAACCAGACCACCCAGAAGGGCCAGAAGAACAGCCGGGAGCGGATGAAGCG
GATCGAGGAGGGCATCAAGGAGCTGGGCAGCCAGATCCTGAAGGAGCACCCCGTGGAGAA
CACCCAGCTGCAGAACGAGAAGCTGTACCTGTACTACCTGCAGAACGGCCGGGACATGTAC
GTGGACCAGGAGCTGGACATCAACCGGCTGAGCGACTACGACGTGGCCGCCATCGTGCCCC
AGAGCTTCCTGAAGGACGACAGCATCGACAACAAGGTGCTGACCCGGAGCGACAAGGCCCG
GGGCAAGAGCGACAACGTGCCCAGCGAGGAGGTGGTGAAGAAGATGAAGAACTACTGGCG
GCAGCTGCTGAACGCCAAGCTGATCACCCAGCGGAAGTTCGACAACCTGACCAAGGCCGAG
CGGGGCGGCCTGAGCGAGCTGGACAAGGCCGGCTTCATCAAGCGGCAGCTGGTGGAGACCC
GGCAGATCACCAAGCACGTGGCCCAGATCCTGGACAGCCGGATGAACACCAAGTACGACGA
GAACGACAAGCTGATCCGGGAGGTGAAGGTGATCACCCTGAAATCCAAGCTGGTGAGCGAC
TTCCGGAAGGACTTCCAGTTCTACAAGGTGCGGGAGATCAACAACTACCACCACGCCCACG
ACGCCTACCTGAACGCCGTGGTGGGCACCGCCCTGATCAAGAAGTACCCCAAGCTGGAGAG
CGAGTTCGTGTACGGCGACTACAAGGTGTACGACGTGCGGAAGATGATCGCCAAGAGCGAG
CAGGAGATCGGCAAGGCCACCGCCAAGTACTTCTTCTACAGCAACATCATGAACTTCTTCAA
GACCGAGATCACCCTGGCCAACGGCGAGATCCGGAAGCGGCCCCTGATCGAGACCAACGGC
GAGACCGGCGAGATCGTGTGGGACAAGGGCCGGGACTTCGCCACCGTGCGGAAGGTGCTGA
GCATGCCCCAGGTGAACATCGTGAAGAAAACCGAGGTGCAGACCGGCGGCTTCAGCAAGGA
GAGCATCCTGCCCAAGCGGAACAGCGACAAGCTGATCGCCCGGAAGAAGGACTGGGACCCC
AAGAAGTACGGCGGCTTCGACAGCCCCACCGTGGCCTACAGCGTGCTGGTGGTGGCCAAGG
TGGAGAAGGGCAAGAGCAAGAAGCTGAAATCCGTGAAGGAGCTGCTGGGCATCACCATCAT
GGAGCGGAGCAGCTTCGAGAAGAACCCCATCGACTTCCTGGAGGCCAAGGGCTACAAGGAG
GTGAAGAAGGACCTGATCATCAAGCTGCCCAAGTACAGCCTGTTCGAGCTGGAGAACGGCC
GGAAGCGGATGCTGGCCAGCGCCGGCGAGCTGCAGAAGGGCAACGAGCTGGCCCTGCCCAG
CAAGTACGTGAACTTCCTGTACCTGGCCAGCCACTACGAGAAGCTGAAGGGCAGCCCCGAG
GACAACGAGCAGAAGCAGCTGTTCGTGGAGCAGCACAAGCACTACCTGGACGAGATCATCG
AGCAGATCAGCGAGTTCAGCAAGCGGGTGATCCTGGCCGACGCCAACCTGGACAAGGTGCT
GAGCGCCTACAACAAGCACCGGGACAAGCCCATCCGGGAGCAGGCCGAGAACATCATCCAC
CTGTTCACCCTGACCAACCTGGGCGCCCCCGCCGCCTTCAAGTACTTCGACACCACCATCGA
CCGGAAGCGGTACACCAGCACCAAGGAGGTGCTGGACGCCACCCTGATCCACCAGAGCATC
ACCGGCCTGTACGAGACCCGGATCGACCTGAGCCAGCTGGGCGGCGACAGCGGCGGCAAGC
GGCCCGCCGCCACCAAGAAGGCCGGCCAGGCCAAGAAGAAGAAGTCGGGCGGGGGTGGCT
CAGAGGAGCCCGAGGAGCCCGCCGATAGCGGACAATCTCTGGTGCCCGTCTACATCTACAG
CCCCGAATATGTGAGCATGTGTGATTCCCTCGCCAAGATCCCTAAGAGAGCCAGCATGGTGC
ATTCTCTGATCGAGGCCTACGCTCTGCATAAGCAAATGAGGATCGTGAAGCCCAAGGTCGCC
AGCATGGAAGAGATGGCCACCTTTCACACCGATGCCTACCTCCAACATCTCCAGAAGGTGTC
CCAAGAGGGCGACGACGACCACCCCGACTCCATTGAGTACGGACTGGGCTATGATTGCCCC
GCCACCGAGGGCATCTTTGACTATGCCGCCGCTATCGGCGGAGCTACCATCACAGCCGCCCA
GTGTCTGATTGATGGCATGTGCAAGGTCGCCATCAACTGGTCCGGAGGCTGGCATCATGCCA
AGAAGGATGAGGCCTCCGGCTTCTGTTATCTGAATGACGCCGTGCTGGGCATTCTGAGACTG
AGGAGGAAATTCGAGAGGATTCTGTACGTGGATCTGGATCTGCATCACGGAGATGGAGTCG
AAGATGCCTTCAGCTTCACCAGCAAGGTGATGACAGTCTCTCTGCACAAGTTCTCCCCCGGC
TTCTTTCCCGGAACCGGCGACGTGTCCGACGTGGGACTGGGCAAGGGAAGGTACTACAGCG
TGAACGTGCCCATTCAAGACGGCATCCAAGACGAGAAGTACTACCAGATCTGCGAGTCCGT
GCTCAAGGAGGTCTACCAAGCCTTCAATCCTAAGGCTGTCGTGCTCCAACTGGGAGCTGATA
CCATTGCTGGCGATCCCATGTGCAGCTTCAATATGACACCCGTCGGAATCGGCAAGTGCCTC
AAGTACATCCTCCAGTGGCAGCTCGCCACCCTCATTCTCGGAGGAGGCGGATACAATCTGGC
TAATACCGCCAGATGCTGGACCTATCTGACCGGCGTGATTCTGGGCAAAACACTGAGCAGCG
AAATCCCCGACCACGAGTTTTTCACCGCTTACGGCCCCGACTACGTGCTGGAGATCACCCCC
AGCTGCAGACCCGATAGAAACGAACCCCATAGAATCCAGCAAATTCTGAACTATATCAAGG
GCAACCTCAAGCACGTCGTGGGAGGTGGCGGATCGGGAAAGCGGCCCGCCGCCACCAAGAA
GGCCGGTCAGGCCAAGAAGAAGAAGGGCAGCTACCCCTACGACGTGCCCGACTACGCCTGA
GCGGCCGCTTAATTAAGCTGCCTTCTGCGGGGCTTGCCTTCTGGCCATGCCCTTCTTCTCTCC
CTTGCACCTGTACCTCTTGGTCTTTGAATAAAGCCTGAGTAGGAAGTCTAGAAAAAAAAAAA
AAAAAAAAAAAAAAAAAAAAAAAAAAAAAAAAAAAAAAAAAAAAAAAAAAAAAAAAAA
AAAAAAAAAAA

[0571] In some embodiments, an expression repressor comprises the amino acid sequence of SEQ ID NOs: 39 or 74. In some embodiments, an expression repressor described herein comprises an amino acid sequence of 25 SEQ ID NO: 39 or 74 or a sequence with at least 80, 85, 90, 95, 99, or 100% identity thereto, or having no more than 20, 19, 18, 17, 16, 15, 14, 13, 12, 11, 10, 9, 8, 7, 6, 5, 4, 3, 2, or 1 positions of difference thereto.

dCas9-HDAC8
(SEQ ID NO: 39)
MAPKKKRKVGIHGVPAADKKYSIGLAIGTNSVGWAVITDEYKVPSKKFKV
LGNTDRHSIKKNLIGALLFDSGETAEATRLKRTARRRYTRRKNRICYLQE
IFSNEMAKVDDSFFHRLEESFLVEEDKKHERHPIFGNIVDEVAYHEKYPT
IYHLRKKLVDSTDKADLRLIYLALAHMIKFRGHFLIEGDLNPDNSDVDKL
FIQLVQTYNQLFEENPINASGVDAKAILSARLSKSRRLENLIAQLPGEKK
NGLFGNLIALSLGLTPNFKSNFDLAEDAKLQLSKDTYDDDLDNLLAQIGD
QYADLFLAAKNLSDAILLSDILRVNTEITKAPLSASMIKRYDEHHQDLTL
KLALVRQQLPEKYKEIFFDQSKNGYAGYIDGGASQEEFYKFIKPILEKMD
GTEELLVKLNREDLLRKQRTFDNGSIPHQIHLGELHAILRRQEDFYPFLK
DNREKIEKILTFRIPYYVGPLARGNSRFAWMTRKSEETITPWNFEEVVDK
GASAQSFIERMTNFDKNLPNEKVLPKHSLLYEYFTVYNELTKVKYVTEGM
RKPAFLSGEQKKAIVDLLFKTNRKVTVKQLKEDYFKKIECFDSVEISGVE
DRFNASLGTYHDLLKIIKDKDFLDNEENEDILEDIVLTLTLFEDREMIEE
RLKTYAHLFDDKVMKQLKRRRYTGWGRLSRKLINGIRDKQSGKTILDFLK
SDGFANRNFMQLIHDDSLTFKEDIQKAQVSGQGDSLHEHIANLAGSPAIK
KGILQTVKVVDELVKVMGRHKPENIVIEMARENQTTQKGQKNSRERMKRI
EEGIKELGSQILKEHPVENTQLQNEKLYLYYLQNGRDMYVDQELDINRLS
DYDVAAIVPQSFLKDDSIDNKVLTRSDKARGKSDNVPSEEVVKKMKNYWR
QLLNAKLITQRKFDNLTKAERGGLSELDKAGFIKRQLVETRQITKHVAQI
LDSRMNTKYDENDKLIREVKVITLKSKLVSDFRKDFQFYKVREINNYHHA
HDAYLNAVVGTALIKKYPKLESEFVYGDYKVYDVRKMIAKSEQEIGKATA
KYFFYSNIMNFFKTEITLANGEIRKRPLIETNGETGEIVWDKGRDFATVR
KVLSMPQVNIVKKTEVQTGGFSKESILPKRNSDKLIARKKDWDPKKYGGF
DSPTVAYSVLVVAKVEKGKSKKLKSVKELLGITIMERSSFEKNPIDFLEA
KGYKEVKKDLIIKLPKYSLFELENGRKRMLASAGELQKGNELALPSKYVN
FLYLASHYEKLKGSPEDNEQKQLFVEQHKHYLDEIIEQISEFSKRVILAD
ANLDKVLSAYNKHRDKPIREQAENIIHLFTLTNLGAPAAFKYFDTTIDRK
RYTSTKEVLDATLIHQSITGLYETRIDLSQLGGDSGGKRPAATKKAGQAK
KKKSGGGGSEEPEEPADSGQSLVPVYIYSPEYVSMCDSLAKIPKRASMVH
SLIEAYALHKQMRIVKPKVASMEEMATFHTDAYLQHLQKVSQEGDDDHPD
SIEYGLGYDCPATEGIFDYAAAIGGATITAAQCLIDGMCKVAINWSGGWH
HAKKDEASGFCYLNDAVLGILRLRRKFERILYVDLDLHHGDGVEDAFSFT
SKVMTVSLHKFSPGFFPGTGDVSDVGLGKGRYYSVNVPIQDGIQDEKYYQ
ICESVLKEVYQAFNPKAVVLQLGADTIAGDPMCSFNMTPVGIGKCLKYIL
QWQLATLILGGGGYNLANTARCWTYLTGVILGKTLSSEIPDHEFFTAYGP
DYVLEITPSCRPDRNEPHRIQQILNYIKGNLKHVVGGGGSGKRPAATKKA
GQAKKKKGSYPYDVPDYA
dCas9-HDAC8 without HA tag
(SEQ ID NO: 74)
MAPKKKRKVGIHGVPAADKKYSIGLAIGTNSVGWAVITDEYKVPSKKFKV
LGNTDRHSIKKNLIGALLFDSGETAEATRLKRTARRRYTRRKNRICYLQE
IFSNEMAKVDDSFFHRLEESFLVEEDKKHERHPIFGNIVDEVAYHEKYPT
IYHLRKKLVDSTDKADLRLIYLALAHMIKFRGHFLIEGDLNPDNSDVDKL
FIQLVQTYNQLFEENPINASGVDAKAILSARLSKSRRLENLIAQLPGEKK
NGLFGNLIALSLGLTPNFKSNFDLAEDAKLQLSKDTYDDDLDNLLAQIGD
QYADLFLAAKNLSDAILLSDILRVNTEITKAPLSASMIKRYDEHHQDLTL
LKALVRQQLPEKYKEIFFDQSKNGYAGYIDGGASQEEFYKFIKPILEKMD
GTEELLVKLNREDLLRKQRTFDNGSIPHQIHLGELHAILRRQEDFYPFLK
DNREKIEKILTFRIPYYVGPLARGNSRFAWMTRKSEETITPWNFEEVVDK
GASAQSFIERMTNFDKNLPNEKVLPKHSLLYEYFTVYNELTKVKYVTEGM
RKPAFLSGEQKKAIVDLLFKTNRKVTVKQLKEDYFKKIECFDSVEISGVE
DRFNASLGTYHDLLKIIKDKDFLDNEENEDILEDIVLTLTLFEDREMIEE
RLKTYAHLFDDKVMKQLKRRRYTGWGRLSRKLINGIRDKQSGKTILDFLK
SDGFANRNFMQLIHDDSLTFKEDIQKAQVSGQGDSLHEHIANLAGSPAIK
KGILQTVKVVDELVKVMGRHKPENIVIEMARENQTTQKGQKNSRERMKRI
EEGIKELGSQILKEHPVENTQLQNEKLYLYYLQNGRDMYVDQELDINRLS
DYDVAAIVPQSFLKDDSIDNKVLTRSDKARGKSDNVPSEEVVKKMKNYWR
QLLNAKLITQRKFDNLTKAERGGLSELDKAGFIKRQLVETRQITKHVAQI
LDSRMNTKYDENDKLIREVKVITLKSKLVSDFRKDFQFYKVREINNYHHA
HDAYLNAVVGTALIKKYPKLESEFVYGDYKVYDVRKMIAKSEQEIGKATA
KYFFYSNIMNFFKTEITLANGEIRKRPLIETNGETGEIVWDKGRDFATVR
KVLSMPQVNIVKKTEVQTGGFSKESILPKRNSDKLIARKKDWDPKKYGGF
DSPTVAYSVLVVAKVEKGKSKKLKSVKELLGITIMERSSFEKNPIDFLEA
KGYKEVKKDLIIKLPKYSLFELENGRKRMLASAGELQKGNELALPSKYVN
FLYLASHYEKLKGSPEDNEQKQLFVEQHKHYLDEIIEQISEFSKRVILAD
ANLDKVLSAYNKHRDKPIREQAENIIHLFTLTNLGAPAAFKYFDTTIDRK
RYTSTKEVLDATLIHQSITGLYETRIDLSQLGGDSGGKRPAATKKAGQAK
KKKSGGGGSEEPEEPADSGQSLVPVYIYSPEYVSMCDSLAKIPKRASMVH
SLIEAYALHKQMRIVKPKVASMEEMATFHTDAYLQHLQKVSQEGDDDHPD
SIEYGLGYDCPATEGIFDYAAAIGGATITAAQCLIDGMCKVAINWSGGWH
HAKKDEASGFCYLNDAVLGILRLRRKFERILYVDLDLHHGDGVEDAFSFT
SKVMTVSLHKFSPGFFPGTGDVSDVGLGKGRYYSVNVPIQDGIQDEKYYQ
ICESVLKEVYQAFNPKAVVLQLGADTIAGDPMCSFNMTPVGIGKCLKYIL
QWQLATLILGGGGYNLANTARCWTYLTGVILGKTLSSEIPDHEFFTAYGP
DYVLEITPSCRPDRNEPHRIQQILNYIKGNLKHVVGGGGSGKRPAATKKA
GQAKKKKGS

[0572] In some embodiments, an expression repressor comprises a DNA-targeting moiety comprising dCas9, e.g., an S. pyogenes dCas9, and a repressor domain comprising LSD1, e.g., a LSD1 domain. In some embodiments, the expression repressor is encoded by the nucleic acid sequence of SEQ ID NOs: 28 (e.g., a nucleic acid (e.g., cDNA) encoding the expression repressor). In some embodiments, a nucleic acid described herein comprises a nucleic acid sequence of SEQ ID NO: 28 or a sequence with at least 80, 85, 90, 95, 99, or 100% identity thereto, or having no more than 20, 19, 18, 17, 16, 15, 14, 13, 12, 11, 10, 9, 8, 7, 6, 5, 4, 3, 2, or 1 positions of difference thereto.

dCas9-LSD1 (MR-29129)
(SEQ ID NO: 28)
AGGAAATAAGAGAGAAAAGAAGAGTAAGAAGAAATATAAGAGCCACCATGGCCCCCAAGA
AGAAGCGGAAGGTGGGCATCCACGGCGTGCCCGCCGCCGACAAGAAGTACAGCATCGGCCT
GGCCATCGGCACCAACAGCGTGGGCTGGGCCGTGATCACCGACGAGTACAAGGTGCCCAGC
AAGAAGTTCAAGGTGCTGGGCAACACCGACCGGCACAGCATCAAGAAGAACCTGATCGGCG
CCCTGCTGTTCGACAGCGGCGAGACCGCCGAGGCCACCCGGCTGAAGCGGACCGCCCGGCG
GCGGTACACCCGGCGGAAGAACCGGATCTGCTACCTGCAGGAGATCTTCAGCAACGAGATG
GCCAAGGTGGACGACAGCTTCTTCCACCGGCTGGAGGAGAGCTTCCTGGTGGAGGAGGACA
AGAAGCACGAGCGGCACCCCATCTTCGGCAACATCGTGGACGAGGTGGCCTACCACGAGAA
GTACCCCACCATCTACCACCTGCGGAAGAAGCTGGTGGACAGCACCGACAAGGCCGACCTG
CGGCTGATCTACCTGGCCCTGGCCCACATGATCAAGTTCCGGGGCCACTTCCTGATCGAGGG
CGACCTGAACCCCGACAACAGCGACGTGGACAAGCTGTTCATCCAGCTGGTGCAGACCTAC
AACCAGCTGTTCGAGGAGAACCCCATCAACGCCAGCGGCGTGGACGCCAAGGCCATCCTGA
GCGCCCGGCTGAGCAAGAGCCGGCGGCTGGAGAACCTGATCGCCCAGCTGCCCGGCGAGAA
GAAGAACGGCCTGTTCGGCAACCTGATCGCCCTGAGCCTGGGCCTGACCCCCAACTTCAAGA
GCAACTTCGACCTGGCCGAGGACGCCAAGCTGCAGCTGAGCAAGGACACCTACGACGACGA
CCTGGACAACCTGCTGGCCCAGATCGGCGACCAGTACGCCGACCTGTTCCTGGCCGCCAAGA
ACCTGAGCGACGCCATCCTGCTGAGCGACATCCTGCGGGTGAACACCGAGATCACCAAGGC
CCCCCTGAGCGCCAGCATGATCAAGCGGTACGACGAGCACCACCAGGACCTGACCCTGCTG
AAGGCCCTGGTGCGGCAGCAGCTGCCCGAGAAGTACAAGGAGATCTTCTTCGACCAGAGCA
AGAACGGCTACGCCGGCTACATCGACGGCGGCGCCAGCCAGGAGGAGTTCTACAAGTTCAT
CAAGCCCATCCTGGAGAAGATGGACGGCACCGAGGAGCTGCTGGTGAAGCTGAACCGGGAG
GACCTGCTGCGGAAGCAGCGGACCTTCGACAACGGCAGCATCCCCCACCAGATCCACCTGG
GCGAGCTGCACGCCATCCTGCGGCGGCAGGAGGACTTCTACCCCTTCCTGAAGGACAACCG
GGAGAAGATCGAGAAGATCCTGACCTTCCGGATCCCCTACTACGTGGGCCCCCTGGCCCGGG
GCAACAGCCGGTTCGCCTGGATGACCCGGAAATCCGAGGAGACCATCACCCCCTGGAACTT
CGAGGAGGTGGTGGACAAGGGCGCCAGCGCCCAGAGCTTCATCGAGCGGATGACCAACTTC
GACAAGAACCTGCCCAACGAGAAGGTGCTGCCCAAGCACAGCCTGCTGTACGAGTACTTCA
CCGTGTACAACGAGCTGACCAAGGTGAAGTACGTGACCGAGGGCATGCGGAAGCCCGCCTT
CCTGAGCGGCGAGCAGAAGAAGGCCATCGTGGACCTGCTGTTCAAGACCAACCGGAAGGTG
ACCGTGAAGCAGCTGAAGGAGGACTACTTCAAGAAGATCGAGTGCTTCGACAGCGTGGAGA
TCAGCGGCGTGGAGGACCGGTTCAACGCCAGCCTGGGCACCTACCACGACCTGCTGAAGAT
CATCAAGGACAAGGACTTCCTGGACAACGAGGAGAACGAGGACATCCTGGAGGACATCGTG
CTGACCCTGACCCTGTTCGAGGACCGGGAGATGATCGAGGAGCGGCTGAAAACCTACGCCC
ACCTGTTCGACGACAAGGTGATGAAGCAGCTGAAGCGGCGGCGGTACACCGGCTGGGGCCG
GCTGAGCCGGAAGCTGATCAACGGCATCCGGGACAAGCAGAGCGGCAAGACCATCCTGGAC
TTCCTGAAATCCGACGGCTTCGCCAACCGGAACTTCATGCAGCTGATCCACGACGACAGCCT
GACCTTCAAGGAGGACATCCAGAAGGCCCAGGTGAGCGGCCAGGGCGACAGCCTGCACGAG
CACATCGCCAACCTGGCCGGCAGCCCCGCCATCAAGAAGGGCATCCTGCAGACCGTGAAGG
TGGTGGACGAGCTGGTGAAGGTGATGGGCCGGCACAAGCCCGAGAACATCGTGATCGAGAT
GGCCCGGGAGAACCAGACCACCCAGAAGGGCCAGAAGAACAGCCGGGAGCGGATGAAGCG
GATCGAGGAGGGCATCAAGGAGCTGGGCAGCCAGATCCTGAAGGAGCACCCCGTGGAGAA
CACCCAGCTGCAGAACGAGAAGCTGTACCTGTACTACCTGCAGAACGGCCGGGACATGTAC
GTGGACCAGGAGCTGGACATCAACCGGCTGAGCGACTACGACGTGGCCGCCATCGTGCCCC
AGAGCTTCCTGAAGGACGACAGCATCGACAACAAGGTGCTGACCCGGAGCGACAAGGCCCG
GGGCAAGAGCGACAACGTGCCCAGCGAGGAGGTGGTGAAGAAGATGAAGAACTACTGGCG
GCAGCTGCTGAACGCCAAGCTGATCACCCAGCGGAAGTTCGACAACCTGACCAAGGCCGAG
CGGGGCGGCCTGAGCGAGCTGGACAAGGCCGGCTTCATCAAGCGGCAGCTGGTGGAGACCC
GGCAGATCACCAAGCACGTGGCCCAGATCCTGGACAGCCGGATGAACACCAAGTACGACGA
GAACGACAAGCTGATCCGGGAGGTGAAGGTGATCACCCTGAAATCCAAGCTGGTGAGCGAC
TTCCGGAAGGACTTCCAGTTCTACAAGGTGCGGGAGATCAACAACTACCACCACGCCCACG
ACGCCTACCTGAACGCCGTGGTGGGCACCGCCCTGATCAAGAAGTACCCCAAGCTGGAGAG
CGAGTTCGTGTACGGCGACTACAAGGTGTACGACGTGCGGAAGATGATCGCCAAGAGCGAG
CAGGAGATCGGCAAGGCCACCGCCAAGTACTTCTTCTACAGCAACATCATGAACTTCTTCAA
GACCGAGATCACCCTGGCCAACGGCGAGATCCGGAAGCGGCCCCTGATCGAGACCAACGGC
GAGACCGGCGAGATCGTGTGGGACAAGGGCCGGGACTTCGCCACCGTGCGGAAGGTGCTGA
GCATGCCCCAGGTGAACATCGTGAAGAAAACCGAGGTGCAGACCGGCGGCTTCAGCAAGGA
GAGCATCCTGCCCAAGCGGAACAGCGACAAGCTGATCGCCCGGAAGAAGGACTGGGACCCC
AAGAAGTACGGCGGCTTCGACAGCCCCACCGTGGCCTACAGCGTGCTGGTGGTGGCCAAGG
TGGAGAAGGGCAAGAGCAAGAAGCTGAAATCCGTGAAGGAGCTGCTGGGCATCACCATCAT
GGAGCGGAGCAGCTTCGAGAAGAACCCCATCGACTTCCTGGAGGCCAAGGGCTACAAGGAG
GTGAAGAAGGACCTGATCATCAAGCTGCCCAAGTACAGCCTGTTCGAGCTGGAGAACGGCC
GGAAGCGGATGCTGGCCAGCGCCGGCGAGCTGCAGAAGGGCAACGAGCTGGCCCTGCCCAG
CAAGTACGTGAACTTCCTGTACCTGGCCAGCCACTACGAGAAGCTGAAGGGCAGCCCCGAG
GACAACGAGCAGAAGCAGCTGTTCGTGGAGCAGCACAAGCACTACCTGGACGAGATCATCG
AGCAGATCAGCGAGTTCAGCAAGCGGGTGATCCTGGCCGACGCCAACCTGGACAAGGTGCT
GAGCGCCTACAACAAGCACCGGGACAAGCCCATCCGGGAGCAGGCCGAGAACATCATCCAC
CTGTTCACCCTGACCAACCTGGGCGCCCCCGCCGCCTTCAAGTACTTCGACACCACCATCGA
CCGGAAGCGGTACACCAGCACCAAGGAGGTGCTGGACGCCACCCTGATCCACCAGAGCATC
ACCGGCCTGTACGAGACCCGGATCGACCTGAGCCAGCTGGGCGGCGACAGCGGCGGCAAGC
GGCCCGCCGCCACCAAGAAGGCCGGCCAGGCCAAGAAGAAGAAGGAGAGCGGCGGCGGCA
GCCTCTCCGGAAAGAAAGCCGCCGCTGCCGCTGCCGCCGCTGCTGCTGCCGCTACCGGCACA
GAAGCTGGCCCCGGAACAGCTGGCGGAAGCGAAAACGGAAGCGAAGTGGCTGCCCAGCCC
GCCGGACTGTCCGGACCCGCCGAGGTGGGACCCGGCGCTGTCGGCGAAAGGACCCCCAGAA
AAAAGGAGCCTCCTAGAGCCAGCCCTCCCGGCGGACTCGCCGAACCTCCCGGCAGCGCTGG
ACCTCAAGCCGGACCTACAGTGGTGCCCGGCAGCGCTACACCTATGGAGACCGGCATCGCT
GAGACCCCCGAGGGAAGGAGAACCAGCAGAAGGAAGAGAGCCAAGGTGGAGTACAGAGAG
ATGGATGAGTCTCTGGCTAACCTCAGCGAGGACGAGTACTACTCCGAGGAGGAAAGGAATG
CCAAGGCCGAGAAGGAGAAGAAGCTGCCCCCTCCTCCCCCTCAAGCCCCCCCCGAGGAGGA
GAACGAGTCCGAGCCCGAGGAACCCAGCGGAGTGGAAGGAGCCGCCTTTCAGTCCAGACTG
CCCCACGACAGAATGACATCCCAAGAGGCCGCTTGCTTTCCCGACATTATTTCCGGCCCTCA
GCAGACCCAGAAGGTGTTTCTGTTCATTAGAAATAGAACACTCCAGCTGTGGCTCGACAACC
CCAAGATCCAGCTGACCTTCGAGGCTACCCTCCAACAGCTGGAGGCCCCCTACAATAGCGAT
ACCGTGCTGGTGCACAGAGTGCACAGCTATCTGGAGAGGCACGGCCTCATTAACTTCGGCAT
TTACAAGCGGATCAAGCCCCTGCCCACCAAGAAAACAGGCAAGGTGATCATCATCGGCAGC
GGCGTGAGCGGCCTGGCCGCCGCCCGGCAGCTGCAGAGCTTCGGCATGGACGTGACCCTGC
TGGAGGCCCGGGACCGGGTGGGCGGCCGGGTGGCCACCTTCCGGAAGGGCAACTACGTGGC
CGACCTGGGCGCCATGGTGGTGACCGGCCTGGGCGGCAACCCCATGGCCGTGGTGAGCAAG
CAGGTGAACATGGAGCTGGCCAAGATCAAGCAGAAGTGCCCCCTGTACGAGGCCAACGGCC
AGGCCGTGCCCAAGGAGAAGGACGAGATGGTGGAGCAGGAGTTCAACCGGCTGCTGGAGG
CCACCAGCTACCTGAGCCACCAGCTGGACTTCAACGTGCTGAACAACAAGCACGTGAGCCT
GGGCCAGGCCCTGGAGGTGGTGATCCAGCTGCAGGAGAAGCACGTGAAGGACGAGCAGATC
GAGCACTGGAAGAAGATCGTGAAAACACAGGAGGAGCTGAAGGAGCTGCTGAACAAGATG
GTGAACCTGAAGGAGAAGATCAAGGAGCTGCACCAGCAGTACAAGGAGGCCAGCGAGGTG
AAGCCCCCCCGGGACATCACCGCCGAGTTCCTGGTCAAAAGCAAGCACCGGGACCTGACCG
CCCTGTGCAAGGAGTACGACGAGCTGGCCGAGACCCAGGGCAAGCTGGAGGAGAAGCTGCA
GGAGCTGGAGGCCAACCCCCCCAGCGACGTGTACCTGAGCAGCCGGGACCGGCAGATCCTG
GACTGGCACTTCGCCAACCTGGAGTTCGCCAACGCCACCCCCCTGAGCACCCTGAGCCTGAA
GCACTGGGACCAGGACGACGACTTCGAGTTCACCGGCAGCCACCTGACCGTGCGGAACGGC
TACAGCTGCGTGCCCGTGGCCCTGGCCGAGGGCCTGGACATCAAGCTGAACACCGCCGTGC
GGCAGGTGCGGTACACCGCCAGCGGCTGCGAGGTGATCGCCGTGAACACCCGGAGCACCAG
CCAGACCTTCATCTACAAGTGCGACGCCGTGCTGTGCACCCTGCCCCTGGGCGTGCTGAAGC
AGCAGCCCCCCGCCGTGCAGTTCGTGCCCCCCCTGCCCGAGTGGAAAACAAGCGCCGTGCA
GCGGATGGGCTTCGGCAACCTGAACAAGGTGGTGCTGTGCTTCGACCGGGTGTTCTGGGACC
CCAGCGTGAACCTGTTCGGCCACGTGGGCAGCACCACCGCCAGCCGGGGCGAGCTGTTCCTG
TTCTGGAACCTGTACAAGGCCCCCATCCTGCTGGCCCTGGTGGCCGGCGAGGCCGCCGGCAT
CATGGAGAACATCAGCGACGACGTGATCGTGGGCCGGTGCCTGGCCATCCTGAAGGGCATC
TTCGGCAGCAGCGCCGTGCCCCAGCCCAAGGAGACCGTGGTGAGCCGGTGGCGGGCCGACC
CCTGGGCCCGGGGCAGCTACAGCTACGTGGCCGCCGGCAGCAGCGGCAACGACTACGACCT
GATGGCCCAGCCCATCACCCCCGGCCCCAGCATCCCCGGCGCCCCCCAGCCCATCCCCCGGC
TGTTCTTCGCCGGCGAGCACACCATCCGGAACTACCCCGCCACCGTGCACGGCGCCCTGCTG
AGCGGCCTGCGGGAGGCAGGACGGATCGCCGACCAGTTCCTGGGCGCCATGTACACCCTGC
CCCGGCAGGCCACCCCCGGCGTGCCCGCCCAGCAGAGCCCCAGCATGAGCGGCGGCAAGCG
GCCCGCCGCCACCAAGAAGGCCGGCCAGGCCAAGAAGAAGAAGGGCAGCTACCCCTACGA
CGTGCCCGACTACGCCTGAGCGGCCGCTTAATTAAGCTGCCTTCTGCGGGGCTTGCCTTCTG
GCCATGCCCTTCTTCTCTCCCTTGCACCTGTACCTCTTGGTCTTTGAATAAAGCCTGAGTAGG
AAGTCTAGAAAAAAAAAAAAAAAAAAAAAAAAAAAAAAAAAAAAAAAAAAAAAAAAAAA
AAAAAAAAAAAAAAAAAAAAAAAAAAAAA

[0573] In some embodiments, an expression repressor comprises the amino acid sequence of SEQ ID NOs: 40 or 75. In some embodiments, an expression repressor described herein comprises an amino acid sequence of SEQ ID NO: 40 or 75, or a sequence with at least 80, 85, 90, 95, 99, or 100% identity thereto, or having no more than 20, 19, 18, 17, 16, 15, 14, 13, 12, 11, 10, 9, 8, 7, 6, 5, 4, 3, 2, or 1 positions of difference thereto.

dCas9-LSD1
(SEQ ID NO: 40)
MAPKKKRKVGIHGVPAADKKYSIGLAIGTNSVGWAVITDEYKVPSKKFKV
LGNTDRHSIKKNLIGALLFDSGETAEATRLKRTARRRYTRRKNRICYLQE
IFSNEMAKVDDSFFHRLEESFLVEEDKKHERHPIFGNIVDEVAYHEKYPT
IYHLRKKLVDSTDKADLRLIYLALAHMIKFRGHFLIEGDLNPDNSDVDKL
FIQLVQTYNQLFEENPINASGVDAKAILSARLSKSRRLENLIAQLPGEKK
NGLFGNLIALSLGLTPNFKSNFDLAEDAKLQLSKDTYDDDLDNLLAQIGD
QYADLFLAAKNLSDAILLSDILRVNTEITKAPLSASMIKRYDEHHQDLTL
LKALVRQQLPEKYKEIFFDQSKNGYAGYIDGGASQEEFYKFIKPILEKMD
GTEELLVKLNREDLLRKQRTFDNGSIPHQIHLGELHAILRRQEDFYPFLK
DNREKIEKILTFRIPYYVGPLARGNSRFAWMTRKSEETITPWNFEEVVDK
GASAQSFIERMTNFDKNLPNEKVLPKHSLLYEYFTVYNELTKVKYVTEGM
RKPAFLSGEQKKAIVDLLFKTNRKVTVKQLKEDYFKKIECFDSVEISGVE
DRFNASLGTYHDLLKIIKDKDFLDNEENEDILEDIVLTLTLFEDREMIEE
RLKTYAHLFDDKVMKQLKRRRYTGWGRLSRKLINGIRDKQSGKTILDFLK
SDGFANRNFMQLIHDDSLTFKEDIQKAQVSGQGDSLHEHIANLAGSPAIK
KGILQTVKVVDELVKVMGRHKPENIVIEMARENQTTQKGQKNSRERMKRI
EEGIKELGSQILKEHPVENTQLQNEKLYLYYLQNGRDMYVDQELDINRLS
DYDVAAIVPQSFLKDDSIDNKVLTRSDKARGKSDNVPSEEVVKKMKNYWR
QLLNAKLITQRKFDNLTKAERGGLSELDKAGFIKRQLVETRQITKHVAQI
LDSRMNTKYDENDKLIREVKVITLKSKLVSDFRKDFQFYKVREINNYHHA
HDAYLNAVVGTALIKKYPKLESEFVYGDYKVYDVRKMIAKSEQEIGKATA
KYFFYSNIMNFFKTEITLANGEIRKRPLIETNGETGEIVWDKGRDFATVR
KVLSMPQVNIVKKTEVQTGGFSKESILPKRNSDKLIARKKDWDPKKYGGF
DSPTVAYSVLVVAKVEKGKSKKLKSVKELLGITIMERSSFEKNPIDFLEA
KGYKEVKKDLIIKLPKYSLFELENGRKRMLASAGELQKGNELALPSKYVN
FLYLASHYEKLKGSPEDNEQKQLFVEQHKHYLDEIIEQISEFSKRVILAD
ANLDKVLSAYNKHRDKPIREQAENIIHLFTLTNLGAPAAFKYFDTTIDRK
RYTSTKEVLDATLIHQSITGLYETRIDLSQLGGDSGGKRPAATKKAGQAK
KKKESGGGSLSGKKAAAAAAAAAAAATGTEAGPGTAGGSENGSEVAAQPA
GLSGPAEVGPGAVGERTPRKKEPPRASPPGGLAEPPGSAGPQAGPTVVPG
SATPMETGIAETPEGRRTSRRKRAKVEYREMDESLANLSEDEYYSEEERN
AKAEKEKKLPPPPPQAPPEEENESEPEEPSGVEGAAFQSRLPHDRMTSQE
AACFPDIISGPQQTQKVFLFIRNRTLQLWLDNPKIQLTFEATLQQLEAPY
NSDTVLVHRVHSYLERHGLINFGIYKRIKPLPTKKTGKVIIIGSGVSGLA
AARQLQSFGMDVTLLEARDRVGGRVATFRKGNYVADLGAMVVTGLGGNPM
AVVSKQVNMELAKIKQKCPLYEANGQAVPKEKDEMVEQEFNRLLEATSYL
SHQLDFNVLNNKHVSLGQALEVVIQLQEKHVKDEQIEHWKKIVKTQEELK
ELLNKMVNLKEKIKELHQQYKEASEVKPPRDITAEFLVKSKHRDLTALCK
EYDELAETQGKLEEKLQELEANPPSDVYLSSRDRQILDWHFANLEFANAT
PLSTLSLKHWDQDDDFEFTGSHLTVRNGYSCVPVALAEGLDIKLNTAVRQ
VRYTASGCEVIAVNTRSTSQTFIYKCDAVLCTLPLGVLKQQPPAVQFVPP
LPEWKTSAVQRMGFGNLNKVVLCFDRVFWDPSVNLFGHVGSTTASRGELF
LFWNLYKAPILLALVAGEAAGIMENISDDVIVGRCLAILKGIFGSSAVPQ
PKETVVSRWRADPWARGSYSYVAAGSSGNDYDLMAQPITPGPSIPGAPQP
IPRLFFAGEHTIRNYPATVHGALLSGLREAGRIADQFLGAMYTLPRQATP
GVPAQQSPSMSGGKRPAATKKAGQAKKKKGSYPYDVPDYA
dCas9-LSD1 without HA tag
(SEQ ID NO: 75)
MAPKKKRKVGIHGVPAADKKYSIGLAIGTNSVGWAVITDEYKVPSKKFKV
LGNTDRHSIKKNLIGALLFDSGETAEATRLKRTARRRYTRRKNRICYLQE
IFSNEMAKVDDSFFHRLEESFLVEEDKKHERHPIFGNIVDEVAYHEKYPT
IYHLRKKLVDSTDKADLRLIYLALAHMIKFRGHFLIEGDLNPDNSDVDKL
FIQLVQTYNQLFEENPINASGVDAKAILSARLSKSRRLENLIAQLPGEKK
NGLFGNLIALSLGLTPNFKSNFDLAEDAKLQLSKDTYDDDLDNLLAQIGD
QYADLFLAAKNLSDAILLSDILRVNTEITKAPLSASMIKRYDEHHQDLTL
LKALVRQQLPEKYKEIFFDQSKNGYAGYIDGGASQEEFYKFIKPILEKMD
GTEELLVKLNREDLLRKQRTFDNGSIPHQIHLGELHAILRRQEDFYPFLK
DNREKIEKILTFRIPYYVGPLARGNSRFAWMTRKSEETITPWNFEEVVDK
GASAQSFIERMTNFDKNLPNEKVLPKHSLLYEYFTVYNELTKVKYVTEGM
RKPAFLSGEQKKAIVDLLFKTNRKVTVKQLKEDYFKKIECFDSVEISGVE
DRFNASLGTYHDLLKIIKDKDFLDNEENEDILEDIVLTLTLFEDREMIEE
RLKTYAHLFDDKVMKQLKRRRYTGWGRLSRKLINGIRDKQSGKTILDFLK
SDGFANRNFMQLIHDDSLTFKEDIQKAQVSGQGDSLHEHIANLAGSPAIK
KGILQTVKVVDELVKVMGRHKPENIVIEMARENQTTQKGQKNSRERMKRI
EEGIKELGSQILKEHPVENTQLQNEKLYLYYLQNGRDMYVDQELDINRLS
DYDVAAIVPQSFLKDDSIDNKVLTRSDKARGKSDNVPSEEVVKKMKNYWR
QLLNAKLITQRKFDNLTKAERGGLSELDKAGFIKRQLVETRQITKHVAQI
LDSRMNTKYDENDKLIREVKVITLKSKLVSDFRKDFQFYKVREINNYHHA
HDAYLNAVVGTALIKKYPKLESEFVYGDYKVYDVRKMIAKSEQEIGKATA
KYFFYSNIMNFFKTEITLANGEIRKRPLIETNGETGEIVWDKGRDFATVR
KVLSMPQVNIVKKTEVQTGGFSKESILPKRNSDKLIARKKDWDPKKYGGF
DSPTVAYSVLVVAKVEKGKSKKLKSVKELLGITIMERSSFEKNPIDFLEA
KGYKEVKKDLIIKLPKYSLFELENGRKRMLASAGELQKGNELALPSKYVN
FLYLASHYEKLKGSPEDNEQKQLFVEQHKHYLDEIIEQISEFSKRVILAD
ANLDKVLSAYNKHRDKPIREQAENIIHLFTLTNLGAPAAFKYFDTTIDRK
RYTSTKEVLDATLIHQSITGLYETRIDLSQLGGDSGGKRPAATKKAGQAK
KKKESGGGSLSGKKAAAAAAAAAAAATGTEAGPGTAGGSENGSEVAAQPA
GLSGPAEVGPGAVGERTPRKKEPPRASPPGGLAEPPGSAGPQAGPTVVPG
SATPMETGIAETPEGRRTSRRKRAKVEYREMDESLANLSEDEYYSEEERN
AKAEKEKKLPPPPPQAPPEEENESEPEEPSGVEGAAFQSRLPHDRMTSQE
AACFPDIISGPQQTQKVFLFIRNRTLQLWLDNPKIQLTFEATLQQLEAPY
NSDTVLVHRVHSYLERHGLINFGIYKRIKPLPTKKTGKVIIIGSGVSGLA
AARQLQSFGMDVTLLEARDRVGGRVATFRKGNYVADLGAMVVTGLGGNPM
AVVSKQVNMELAKIKQKCPLYEANGQAVPKEKDEMVEQEFNRLLEATSYL
SHQLDFNVLNNKHVSLGQALEVVIQLQEKHVKDEQIEHWKKIVKTQEELK
ELLNKMVNLKEKIKELHQQYKEASEVKPPRDITAEFLVKSKHRDLTALCK
EYDELAETQGKLEEKLQELEANPPSDVYLSSRDRQILDWHFANLEFANAT
PLSTLSLKHWDQDDDFEFTGSHLTVRNGYSCVPVALAEGLDIKLNTAVRQ
VRYTASGCEVIAVNTRSTSQTFIYKCDAVLCTLPLGVLKQQPPAVQFVPP
LPEWKTSAVQRMGFGNLNKVVLCFDRVFWDPSVNLFGHVGSTTASRGELF
LFWNLYKAPILLALVAGEAAGIMENISDDVIVGRCLAILKGIFGSSAVPQ
PKETVVSRWRADPWARGSYSYVAAGSSGNDYDLMAQPITPGPSIPGAPQP
IPRLFFAGEHTIRNYPATVHGALLSGLREAGRIADQFLGAMYTLPRQATP
GVPAQQSPSMSGGKRPAATKKAGQAKKKKGS

[0574] In some embodiments, an expression repressor comprises a DNA-targeting moiety comprising dCas9, e.g., an S. pyogenes dCas9, and a repressor domain comprising EZH2, e.g., a EZH2 domain. In some embodiments, the expression repressor is encoded by the nucleic acid sequence of SEQ ID NOs: 29 (e.g., a nucleic acid (e.g., cDNA) encoding the expression repressor). In some embodiments, a nucleic acid described herein comprises a nucleic acid sequence of SEQ ID NO: 29 or a sequence with at least 80, 85, 90, 95, 99, or 100% identity thereto, or having no more than 20, 19, 18, 17, 16, 15, 14, 13, 12, 11, 10, 9, 8, 7, 6, 5, 4, 3, 2, or 1 positions of difference thereto.

EZH2-dCas9 (MR-28938)
(SEQ ID NO: 29)
AGGAAATAAGAGAGAAAAGAAGAGTAAGAAGAAATATAAGAGCCACCATGGCCCCCAAGA
AGAAGCGGAAGGTGGGCGGCAGCGGCGGCAGCGGCCAGACCGGCAAGAAGAGCGAGAAGG
GCCCCGTGTGCTGGCGGAAGCGGGTGAAGAGCGAGTACATGCGGCTGCGGCAGCTGAAGCG
GTTCCGGCGGGCCGACGAGGTGAAGAGCATGTTCAGCAGCAACCGGCAGAAGATCCTGGAG
CGGACCGAGATCCTGAACCAGGAGTGGAAGCAGCGGCGAATCCAGCCCGTGCACATCCTGA
CCAGCGTGAGCAGCCTGCGGGGCACCCGGGAGTGCAGCGTGACCAGCGACCTGGACTTCCC
CACCCAGGTGATCCCCCTAAAGACCCTGAACGCCGTGGCCAGCGTGCCCATCATGTACAGCT
GGAGCCCCCTGCAGCAGAACTTCATGGTGGAGGACGAGACCGTGCTGCACAACATCCCCTA
CATGGGCGACGAGGTGCTGGACCAGGACGGCACCTTCATCGAGGAGCTGATCAAGAACTAC
GACGGCAAGGTGCACGGCGACCGGGAGTGCGGCTTCATCAACGACGAGATCTTCGTGGAGC
TGGTGAACGCCCTGGGCCAGTACAACGACGACGACGACGACGACGACGGCGACGACCCCGA
GGAGCGGGAGGAGAAGCAGAAGGACCTGGAGGACCACCGGGACGACAAGGAGAGCCGGCC
CCCCCGGAAGTTCCCCAGCGACAAGATCTTCGAGGCCATCAGCAGCATGTTCCCCGACAAGG
GCACCGCCGAGGAGCTGAAGGAGAAGTACAAGGAGCTGACCGAGCAGCAGCTGCCCGGCG
CCCTGCCCCCCGAGTGCACCCCCAACATCGACGGCCCCAACGCCAAGAGCGTGCAGCGGGA
GCAGAGCCTGCACAGCTTCCACACCCTGTTCTGCCGGCGGTGCTTCAAGTACGACTGCTTCC
TGCACCCCTTCCACGCCACCCCCAACACCTACAAGCGGAAGAACACCGAGACCGCCCTGGA
CAACAAGCCCTGCGGCCCCCAGTGCTACCAGCACCTGGAGGGCGCCAAGGAGTTCGCCGCC
GCCCTGACCGCCGAGCGGATCAAGACCCCCCCCAAGCGGCCCGGCGGCCGGCGGCGGGGCC
GGCTGCCCAACAACAGCAGCCGGCCCAGCACCCCCACCATCAACGTGCTGGAGAGCAAGGA
CACCGACAGCGACCGGGAGGCCGGCACCGAGACCGGCGGCGAGAACAACGACAAGGAGGA
GGAGGAGAAGAAGGACGAGACCAGCAGCAGCAGCGAGGCCAACAGCCGGTGCCAGACCCC
CATCAAGATGAAGCCCAACATCGAGCCCCCCGAGAACGTGGAGTGGAGCGGCGCCGAGGCC
AGCATGTTCCGGGTGCTGATCGGCACCTACTACGACAACTTCTGCGCCATCGCCCGGCTGAT
CGGCACCAAGACCTGCCGGCAGGTGTACGAGTTCCGGGTGAAGGAGAGCAGCATCATCGCC
CCCGCCCCCGCCGAGGACGTGGACACCCCCCCCCGGAAGAAGAAGCGGAAGCACCGGCTGT
GGGCCGCCCACTGCCGGAAGATCCAGCTGAAGAAGGACGGCAGCAGCAACCACGTGTACAA
CTACCAGCCCTGCGACCACCCCCGGCAGCCCTGCGACAGCAGCTGCCCCTGCGTGATCGCCC
AGAACTTCTGCGAGAAGTTCTGCCAGTGCAGCAGCGAGTGCCAGAACCGGTTCCCCGGCTGC
CGGTGCAAGGCCCAGTGCAACACCAAGCAGTGCCCCTGCTACCTGGCCGTGCGGGAGTGCG
ACCCCGACCTGTGCCTGACCTGCGGCGCCGCCGACCACTGGGACAGCAAGAACGTGAGCTG
CAAGAACTGCAGCATCCAGCGGGGCAGCAAGAAGCACCTGCTGCTGGCCCCCAGCGACGTG
GCCGGCTGGGGCATCTTCATCAAGGACCCCGTGCAGAAGAACGAGTTCATCAGCGAGTACT
GCGGCGAGATCATCAGCCAGGACGAGGCCGACCGGCGGGGCAAGGTGTACGACAAGTACAT
GTGCAGCTTCCTGTTCAACCTGAACAACGACTTCGTGGTGGACGCCACCCGGAAGGGCAACA
AGATCCGGTTCGCCAACCACAGCGTGAACCCCAACTGCTACGCCAAGGTGATGATGGTGAA
CGGCGACCACCGGATCGGCATCTTCGCCAAGCGGGCCATCCAGACCGGCGAGGAGCTGTTC
TTCGACTACCGGTACAGCCAGGCCGACGCCCTGAAGTACGTGGGCATCGAGCGGGAGATGG
AGATCCCCAGCACCGGCGGCAGCGGCGGCAGCGGCGGCAGCGGCGGCAGCGGCGGCAGCG
GCCGACCCGACAAGAAGTACAGCATCGGCCTGGCCATCGGCACCAACAGCGTGGGCTGGGC
CGTGATCACCGACGAGTACAAGGTGCCCAGCAAGAAGTTCAAGGTGCTGGGCAACACCGAC
CGGCACAGCATCAAGAAGAACCTGATCGGCGCCCTGCTGTTCGACAGCGGCGAGACCGCCG
AGGCCACCCGGCTGAAGCGGACCGCCCGGCGGCGGTACACCCGGCGGAAGAACCGGATCTG
CTACCTGCAGGAGATCTTCAGCAACGAGATGGCCAAGGTGGACGACAGCTTCTTCCACCGGC
TGGAGGAGAGCTTCCTGGTGGAGGAGGACAAGAAGCACGAGCGGCACCCCATCTTCGGCAA
CATCGTGGACGAGGTGGCCTACCACGAGAAGTACCCCACCATCTACCACCTGCGGAAGAAG
CTGGTGGACAGCACCGACAAGGCCGACCTGCGGCTGATCTACCTGGCCCTGGCCCACATGAT
CAAGTTCCGGGGCCACTTCCTGATCGAGGGCGACCTGAACCCCGACAACAGCGACGTGGAC
AAGCTGTTCATCCAGCTGGTGCAGACCTACAACCAGCTGTTCGAGGAGAACCCCATCAACGC
CAGCGGCGTGGACGCCAAGGCCATCCTGAGCGCCCGGCTGAGCAAGAGCCGGCGGCTGGAG
AACCTGATCGCCCAGCTGCCCGGCGAGAAGAAGAACGGCCTGTTCGGCAACCTGATCGCCC
TGAGCCTGGGCCTGACCCCCAACTTCAAGAGCAACTTCGACCTGGCCGAGGACGCCAAGCT
GCAGCTGAGCAAGGACACCTACGACGACGACCTGGACAACCTGCTGGCCCAGATCGGCGAC
CAGTACGCCGACCTGTTCCTGGCCGCCAAGAACCTGAGCGACGCCATCCTGCTGAGCGACAT
CCTGCGGGTGAACACCGAGATCACCAAGGCCCCCCTGAGCGCCAGCATGATCAAGCGGTAC
GACGAGCACCACCAGGACCTGACCCTGCTGAAGGCCCTGGTGCGGCAGCAGCTGCCCGAGA
AGTACAAGGAGATCTTCTTCGACCAGAGCAAGAACGGCTACGCCGGCTACATCGACGGCGG
CGCCAGCCAGGAGGAGTTCTACAAGTTCATCAAGCCCATCCTGGAGAAGATGGACGGCACC
GAGGAGCTGCTGGTGAAGCTGAACCGGGAGGACCTGCTGCGGAAGCAGCGGACCTTCGACA
ACGGCAGCATCCCCCACCAGATCCACCTGGGCGAGCTGCACGCCATCCTGCGGCGGCAGGA
GGACTTCTACCCCTTCCTGAAGGACAACCGGGAGAAGATCGAGAAGATCCTGACCTTCCGG
ATCCCCTACTACGTGGGCCCCCTGGCCCGGGGCAACAGCCGGTTCGCCTGGATGACCCGGAA
ATCCGAGGAGACCATCACCCCCTGGAACTTCGAGGAGGTGGTGGACAAGGGCGCCAGCGCC
CAGAGCTTCATCGAGCGGATGACCAACTTCGACAAGAACCTGCCCAACGAGAAGGTGCTGC
CCAAGCACAGCCTGCTGTACGAGTACTTCACCGTGTACAACGAGCTGACCAAGGTGAAGTA
CGTGACCGAGGGCATGCGGAAGCCCGCCTTCCTGAGCGGCGAGCAGAAGAAGGCCATCGTG
GACCTGCTGTTCAAGACCAACCGGAAGGTGACCGTGAAGCAGCTGAAGGAGGACTACTTCA
AGAAGATCGAGTGCTTCGACAGCGTGGAGATCAGCGGCGTGGAGGACCGGTTCAACGCCAG
CCTGGGCACCTACCACGACCTGCTGAAGATCATCAAGGACAAGGACTTCCTGGACAACGAG
GAGAACGAGGACATCCTGGAGGACATCGTGCTGACCCTGACCCTGTTCGAGGACCGGGAGA
TGATCGAGGAGCGGCTGAAAACCTACGCCCACCTGTTCGACGACAAGGTGATGAAGCAGCT
GAAGCGGCGGCGGTACACCGGCTGGGGCCGGCTGAGCCGGAAGCTGATCAACGGCATCCGG
GACAAGCAGAGCGGCAAGACCATCCTGGACTTCCTGAAATCCGACGGCTTCGCCAACCGGA
ACTTCATGCAGCTGATCCACGACGACAGCCTGACCTTCAAGGAGGACATCCAGAAGGCCCA
GGTGAGCGGCCAGGGCGACAGCCTGCACGAGCACATCGCCAACCTGGCCGGCAGCCCCGCC
ATCAAGAAGGGCATCCTGCAGACCGTGAAGGTGGTGGACGAGCTGGTGAAGGTGATGGGCC
GGCACAAGCCCGAGAACATCGTGATCGAGATGGCCCGGGAGAACCAGACCACCCAGAAGG
GCCAGAAGAACAGCCGGGAGCGGATGAAGCGGATCGAGGAGGGCATCAAGGAGCTGGGCA
GCCAGATCCTGAAGGAGCACCCCGTGGAGAACACCCAGCTGCAGAACGAGAAGCTGTACCT
GTACTACCTGCAGAACGGCCGGGACATGTACGTGGACCAGGAGCTGGACATCAACCGGCTG
AGCGACTACGACGTGGCCGCCATCGTGCCCCAGAGCTTCCTGAAGGACGACAGCATCGACA
ACAAGGTGCTGACCCGGAGCGACAAGGCCCGGGGCAAGAGCGACAACGTGCCCAGCGAGG
AGGTGGTGAAGAAGATGAAGAACTACTGGCGGCAGCTGCTGAACGCCAAGCTGATCACCCA
GCGGAAGTTCGACAACCTGACCAAGGCCGAGCGGGGCGGCCTGAGCGAGCTGGACAAGGCC
GGCTTCATCAAGCGGCAGCTGGTGGAGACCCGGCAGATCACCAAGCACGTGGCCCAGATCC
TGGACAGCCGGATGAACACCAAGTACGACGAGAACGACAAGCTGATCCGGGAGGTGAAGG
TGATCACCCTGAAATCCAAGCTGGTGAGCGACTTCCGGAAGGACTTCCAGTTCTACAAGGTG
CGGGAGATCAACAACTACCACCACGCCCACGACGCCTACCTGAACGCCGTGGTGGGCACCG
CCCTGATCAAGAAGTACCCCAAGCTGGAGAGCGAGTTCGTGTACGGCGACTACAAGGTGTA
CGACGTGCGGAAGATGATCGCCAAGAGCGAGCAGGAGATCGGCAAGGCCACCGCCAAGTA
CTTCTTCTACAGCAACATCATGAACTTCTTCAAGACCGAGATCACCCTGGCCAACGGCGAGA
TCCGGAAGCGGCCCCTGATCGAGACCAACGGCGAGACCGGCGAGATCGTGTGGGACAAGGG
CCGGGACTTCGCCACCGTGCGGAAGGTGCTGAGCATGCCCCAGGTGAACATCGTGAAGAAA
ACCGAGGTGCAGACCGGCGGCTTCAGCAAGGAGAGCATCCTGCCCAAGCGGAACAGCGACA
AGCTGATCGCCCGGAAGAAGGACTGGGACCCCAAGAAGTACGGCGGCTTCGACAGCCCCAC
CGTGGCCTACAGCGTGCTGGTGGTGGCCAAGGTGGAGAAGGGCAAGAGCAAGAAGCTGAA
ATCCGTGAAGGAGCTGCTGGGCATCACCATCATGGAGCGGAGCAGCTTCGAGAAGAACCCC
ATCGACTTCCTGGAGGCCAAGGGCTACAAGGAGGTGAAGAAGGACCTGATCATCAAGCTGC
CCAAGTACAGCCTGTTCGAGCTGGAGAACGGCCGGAAGCGGATGCTGGCCAGCGCCGGCGA
GCTGCAGAAGGGCAACGAGCTGGCCCTGCCCAGCAAGTACGTGAACTTCCTGTACCTGGCC
AGCCACTACGAGAAGCTGAAGGGCAGCCCCGAGGACAACGAGCAGAAGCAGCTGTTCGTGG
AGCAGCACAAGCACTACCTGGACGAGATCATCGAGCAGATCAGCGAGTTCAGCAAGCGGGT
GATCCTGGCCGACGCCAACCTGGACAAGGTGCTGAGCGCCTACAACAAGCACCGGGACAAG
CCCATCCGGGAGCAGGCCGAGAACATCATCCACCTGTTCACCCTGACCAACCTGGGCGCCCC
CGCCGCCTTCAAGTACTTCGACACCACCATCGACCGGAAGCGGTACACCAGCACCAAGGAG
GTGCTGGACGCCACCCTGATCCACCAGAGCATCACCGGCCTGTACGAGACCCGGATCGACCT
GAGCCAGCTGGGCGGCGACAGCGGCGGCAAGCGGCCCGCCGCCACCAAGAAGGCCGGCCA
GGCCAAGAAGAAGAAGGGCAGCTACCCCTACGACGTGCCCGACTACGCCTGAGCGGCCGCT
TAATTAAGCTGCCTTCTGCGGGGCTTGCCTTCTGGCCATGCCCTTCTTCTCTCCCTTGCACCTG
TACCTCTTGGTCTTTGAATAAAGCCTGAGTAGGAAGTCTAGAAAAAAAAAAAAAAAAAAAA
AAAAAAAAAAAAAAAAAAAAAAAAAAAAAAAAAAAAAAAAAAAAAAAAAAAAAAAAAA
AA

[0575] In some embodiments, an expression repressor comprises the amino acid sequence of SEQ ID NOs: 41 or 76. In some embodiments, an expression repressor described herein comprises an amino acid sequence of SEQ ID NO: 41 or 76 or a sequence with at least 80, 85, 90, 95, 99, or 100% identity thereto, or having no more than 20, 19, 18, 17, 16, 15, 14, 13, 12, 11, 10, 9, 8, 7, 6, 5, 4, 3, 2, or 1 positions of difference thereto.

EZH2-dCas9
(SEQ ID NO: 41)
MAPKKKRKVGGSGGSGQTGKKSEKGPVCWRKRVKSEYMRLRQLKRFRRAD
EVKSMFSSNRQKILERTEILNQEWKQRRIQPVHILTSVSSLRGTRECSVT
SDLDFPTQVIPLKTLNAVASVPIMYSWSPLQQNFMVEDETVLHNIPYMGD
EVLDQDGTFIEELIKNYDGKVHGDRECGFINDEIFVELVNALGQYNDDDD
DDDGDDPEEREEKQKDLEDHRDDKESRPPRKFPSDKIFEAISSMFPDKGT
AEELKEKYKELTEQQLPGALPPECTPNIDGPNAKSVQREQSLHSFHTLFC
RRCFKYDCFLHPFHATPNTYKRKNTETALDNKPCGPQCYQHLEGAKEFAA
ALTAERIKTPPKRPGGRRRGRLPNNSSRPSTPTINVLESKDTDSDREAGT
ETGGENNDKEEEEKKDETSSSSEANSRCQTPIKMKPNIEPPENVEWSGAE
ASMFRVLIGTYYDNFCAIARLIGTKTCRQVYEFRVKESSIIAPAPAEDVD
TPPRKKKRKHRLWAAHCRKIQLKKDGSSNHVYNYQPCDHPRQPCDSSCPC
VIAQNFCEKFCQCSSECQNRFPGCRCKAQCNTKQCPCYLAVRECDPDLCL
TCGAADHWDSKNVSCKNCSIQRGSKKHLLLAPSDVAGWGIFIKDPVQKNE
FISEYCGEIISQDEADRRGKVYDKYMCSFLFNLNNDFVVDATRKGNKIRF
ANHSVNPNCYAKVMMVNGDHRIGIFAKRAIQTGEELFFDYRYSQADALKY
VGIEREMEIPSTGGSGGSGGSGGSGGSGRPDKKYSIGLAIGTNSVGWAVI
TDEYKVPSKKFKVLGNTDRHSIKKNLIGALLFDSGETAEATRLKRTARRR
YTRRKNRICYLQEIFSNEMAKVDDSFFHRLEESFLVEEDKKHERHPIFGN
IVDEVAYHEKYPTIYHLRKKLVDSTDKADLRLIYLALAHMIKFRGHFLIE
GDLNPDNSDVDKLFIQLVQTYNQLFEENPINASGVDAKAILSARLSKSRR
LENLIAQLPGEKKNGLFGNLIALSLGLTPNFKSNFDLAEDAKLQLSKDTY
DDDLDNLLAQIGDQYADLFLAAKNLSDAILLSDILRVNTEITKAPLSASM
IKRYDEHHQDLTLLKALVRQQLPEKYKEIFFDQSKNGYAGYIDGGASQEE
FYKFIKPILEKMDGTEELLVKLNREDLLRKQRTFDNGSIPHQIHLGELHA
ILRRQEDFYPFLKDNREKIEKILTFRIPYYVGPLARGNSRFAWMTRKSEE
TITPWNFEEVVDKGASAQSFIERMTNFDKNLPNEKVLPKHSLLYEYFTVY
NELTKVKYVTEGMRKPAFLSGEQKKAIVDLLFKTNRKVTVKQLKEDYFKK
IECFDSVEISGVEDRFNASLGTYHDLLKIIKDKDFLDNEENEDILEDIVL
TLTLFEDREMIEERLKTYAHLFDDKVMKQLKRRRYTGWGRLSRKLINGIR
DKQSGKTILDFLKSDGFANRNFMQLIHDDSLTFKEDIQKAQVSGQGDSLH
EHIANLAGSPAIKKGILQTVKVVDELVKVMGRHKPENIVIEMARENQTTQ
KGQKNSRERMKRIEEGIKELGSQILKEHPVENTQLQNEKLYLYYLQNGRD
MYVDQELDINRLSDYDVAAIVPQSFLKDDSIDNKVLTRSDKARGKSDNVP
SEEVVKKMKNYWRQLLNAKLITQRKFDNLTKAERGGLSELDKAGFIKRQL
VETRQITKHVAQILDSRMNTKYDENDKLIREVKVITLKSKLVSDFRKDFQ
FYKVREINNYHHAHDAYLNAVVGTALIKKYPKLESEFVYGDYKVYDVRKM
IAKSEQEIGKATAKYFFYSNIMNFFKTEITLANGEIRKRPLIETNGETGE
IVWDKGRDFATVRKVLSMPQVNIVKKTEVQTGGFSKESILPKRNSDKLIA
RKKDWDPKKYGGFDSPTVAYSVLVVAKVEKGKSKKLKSVKELLGITIMER
SSFEKNPIDFLEAKGYKEVKKDLIIKLPKYSLFELENGRKRMLASAGELQ
KGNELALPSKYVNFLYLASHYEKLKGSPEDNEQKQLFVEQHKHYLDEIIE
QISEFSKRVILADANLDKVLSAYNKHRDKPIREQAENIIHLFTLTNLGAP
AAFKYFDTTIDRKRYTSTKEVLDATLIHQSITGLYETRIDLSQLGGDSGG
KRPAATKKAGQAKKKKGSYPYDVPDYA
EZH2-dCas9 without HA tag
(SEQ ID NO: 76)
MAPKKKRKVGGSGGSGQTGKKSEKGPVCWRKRVKSEYMRLRQLKRFRRAD
EVKSMFSSNRQKILERTEILNQEWKQRRIQPVHILTSVSSLRGTRECSVT
SDLDFPTQVIPLKTLNAVASVPIMYSWSPLQQNFMVEDETVLHNIPYMGD
EVLDQDGTFIEELIKNYDGKVHGDRECGFINDEIFVELVNALGQYNDDDD
DDDGDDPEEREEKQKDLEDHRDDKESRPPRKFPSDKIFEAISSMFPDKGT
AEELKEKYKELTEQQLPGALPPECTPNIDGPNAKSVQREQSLHSFHTLFC
RRCFKYDCFLHPFHATPNTYKRKNTETALDNKPCGPQCYQHLEGAKEFAA
ALTAERIKTPPKRPGGRRRGRLPNNSSRPSTPTINVLESKDTDSDREAGT
ETGGENNDKEEEEKKDETSSSSEANSRCQTPIKMKPNIEPPENVEWSGAE
ASMFRVLIGTYYDNFCAIARLIGTKTCRQVYEFRVKESSIIAPAPAEDVD
TPPRKKKRKHRLWAAHCRKIQLKKDGSSNHVYNYQPCDHPRQPCDSSCPC
VIAQNFCEKFCQCSSECQNRFPGCRCKAQCNTKQCPCYLAVRECDPDLCL
TCGAADHWDSKNVSCKNCSIQRGSKKHLLLAPSDVAGWGIFIKDPVQKNE
FISEYCGEIISQDEADRRGKVYDKYMCSFLFNLNNDFVVDATRKGNKIRF
ANHSVNPNCYAKVMMVNGDHRIGIFAKRAIQTGEELFFDYRYSQADALKY
VGIEREMEIPSTGGSGGSGGSGGSGGSGRPDKKYSIGLAIGTNSVGWAVI
TDEYKVPSKKFKVLGNTDRHSIKKNLIGALLFDSGETAEATRLKRTARRR
YTRRKNRICYLQEIFSNEMAKVDDSFFHRLEESFLVEEDKKHERHPIFGN
IVDEVAYHEKYPTIYHLRKKLVDSTDKADLRLIYLALAHMIKFRGHFLIE
GDLNPDNSDVDKLFIQLVQTYNQLFEENPINASGVDAKAILSARLSKSRR
LENLIAQLPGEKKNGLFGNLIALSLGLTPNFKSNFDLAEDAKLQLSKDTY
DDDLDNLLAQIGDQYADLFLAAKNLSDAILLSDILRVNTEITKAPLSASM
IKRYDEHHQDLTLLKALVRQQLPEKYKEIFFDQSKNGYAGYIDGGASQEE
FYKFIKPILEKMDGTEELLVKLNREDLLRKQRTFDNGSIPHQIHLGELHA
ILRRQEDFYPFLKDNREKIEKILTFRIPYYVGPLARGNSRFAWMTRKSEE
TITPWNFEEVVDKGASAQSFIERMTNFDKNLPNEKVLPKHSLLYEYFTVY
NELTKVKYVTEGMRKPAFLSGEQKKAIVDLLFKTNRKVTVKQLKEDYFKK
IECFDSVEISGVEDRFNASLGTYHDLLKIIKDKDFLDNEENEDILEDIVL
TLTLFEDREMIEERLKTYAHLFDDKVMKQLKRRRYTGWGRLSRKLINGIR
DKQSGKTILDFLKSDGFANRNFMQLIHDDSLTFKEDIQKAQVSGQGDSLH
EHIANLAGSPAIKKGILQTVKVVDELVKVMGRHKPENIVIEMARENQTTQ
KGQKNSRERMKRIEEGIKELGSQILKEHPVENTQLQNEKLYLYYLQNGRD
MYVDQELDINRLSDYDVAAIVPQSFLKDDSIDNKVLTRSDKARGKSDNVP
SEEVVKKMKNYWRQLLNAKLITQRKFDNLTKAERGGLSELDKAGFIKRQL
VETRQITKHVAQILDSRMNTKYDENDKLIREVKVITLKSKLVSDFRKDFQ
FYKVREINNYHHAHDAYLNAVVGTALIKKYPKLESEFVYGDYKVYDVRKM
IAKSEQEIGKATAKYFFYSNIMNFFKTEITLANGEIRKRPLIETNGETGE
IVWDKGRDFATVRKVLSMPQVNIVKKTEVQTGGFSKESILPKRNSDKLIA
RKKDWDPKKYGGFDSPTVAYSVLVVAKVEKGKSKKLKSVKELLGITIMER
SSFEKNPIDFLEAKGYKEVKKDLIIKLPKYSLFELENGRKRMLASAGELQ
KGNELALPSKYVNFLYLASHYEKLKGSPEDNEQKQLFVEQHKHYLDEIIE
QISEFSKRVILADANLDKVLSAYNKHRDKPIREQAENIIHLFTLTNLGAP
AAFKYFDTTIDRKRYTSTKEVLDATLIHQSITGLYETRIDLSQLGGDSGG
KRPAATKKAGQAKKKKGS

[0576] In some embodiments, an expression repressor comprises a DNA-targeting moiety comprising dCas9, e.g., an S. pyogenes dCas9, and a first repressor domain comprising EZH2 e.g., a EZH2 domain and a second repressor domain comprising KRAB, e.g., a KRAB domain. In some embodiments, the expression repressor is encoded by the nucleic acid sequence of SEQ ID NOs: 30 (e.g., a nucleic acid (e.g., cDNA) encoding the expression repressor). In some embodiments, a nucleic acid described herein comprises a nucleic acid sequence of SEQ ID NO: 30 or a sequence with at least 80, 85, 90, 95, 99, or 100% identity thereto, or having no more than 20, 19, 18, 17, 16, 15, 14, 13, 12, 11, 10, 9, 8, 7, 6, 5, 4, 3, 2, or 1 positions of difference thereto.

EZH2- dCas9-KRAB (MR-29448)
(SEQ ID NO: 30)
AGGAAATAAGAGAGAAAAGAAGAGTAAGAAGAAATATAAGAGCCACCATGGCCCCCAAGA
AGAAGCGGAAGGTGGGCGGCAGCGGCGGCAGCGGCCAGACCGGCAAGAAGAGCGAGAAGG
GCCCCGTGTGCTGGCGGAAGCGGGTGAAGAGCGAGTACATGCGGCTGCGGCAGCTGAAGCG
GTTCCGGCGGGCCGACGAGGTGAAGAGCATGTTCAGCAGCAACCGGCAGAAGATCCTGGAG
CGGACCGAGATCCTGAACCAGGAGTGGAAGCAGCGGCGAATCCAGCCCGTGCACATCCTGA
CCAGCGTGAGCAGCCTGCGGGGCACCCGGGAGTGCAGCGTGACCAGCGACCTGGACTTCCC
CACCCAGGTGATCCCCCTAAAGACCCTGAACGCCGTGGCCAGCGTGCCCATCATGTACAGCT
GGAGCCCCCTGCAGCAGAACTTCATGGTGGAGGACGAGACCGTGCTGCACAACATCCCCTA
CATGGGCGACGAGGTGCTGGACCAGGACGGCACCTTCATCGAGGAGCTGATCAAGAACTAC
GACGGCAAGGTGCACGGCGACCGGGAGTGCGGCTTCATCAACGACGAGATCTTCGTGGAGC
TGGTGAACGCCCTGGGCCAGTACAACGACGACGACGACGACGACGACGGCGACGACCCCGA
GGAGCGGGAGGAGAAGCAGAAGGACCTGGAGGACCACCGGGACGACAAGGAGAGCCGGCC
CCCCCGGAAGTTCCCCAGCGACAAGATCTTCGAGGCCATCAGCAGCATGTTCCCCGACAAGG
GCACCGCCGAGGAGCTGAAGGAGAAGTACAAGGAGCTGACCGAGCAGCAGCTGCCCGGCG
CCCTGCCCCCCGAGTGCACCCCCAACATCGACGGCCCCAACGCCAAGAGCGTGCAGCGGGA
GCAGAGCCTGCACAGCTTCCACACCCTGTTCTGCCGGCGGTGCTTCAAGTACGACTGCTTCC
TGCACCCCTTCCACGCCACCCCCAACACCTACAAGCGGAAGAACACCGAGACCGCCCTGGA
CAACAAGCCCTGCGGCCCCCAGTGCTACCAGCACCTGGAGGGCGCCAAGGAGTTCGCCGCC
GCCCTGACCGCCGAGCGGATCAAGACCCCCCCCAAGCGGCCCGGCGGCCGGCGGCGGGGCC
GGCTGCCCAACAACAGCAGCCGGCCCAGCACCCCCACCATCAACGTGCTGGAGAGCAAGGA
CACCGACAGCGACCGGGAGGCCGGCACCGAGACCGGCGGCGAGAACAACGACAAGGAGGA
GGAGGAGAAGAAGGACGAGACCAGCAGCAGCAGCGAGGCCAACAGCCGGTGCCAGACCCC
CATCAAGATGAAGCCCAACATCGAGCCCCCCGAGAACGTGGAGTGGAGCGGCGCCGAGGCC
AGCATGTTCCGGGTGCTGATCGGCACCTACTACGACAACTTCTGCGCCATCGCCCGGCTGAT
CGGCACCAAGACCTGCCGGCAGGTGTACGAGTTCCGGGTGAAGGAGAGCAGCATCATCGCC
CCCGCCCCCGCCGAGGACGTGGACACCCCCCCCCGGAAGAAGAAGCGGAAGCACCGGCTGT
GGGCCGCCCACTGCCGGAAGATCCAGCTGAAGAAGGACGGCAGCAGCAACCACGTGTACAA
CTACCAGCCCTGCGACCACCCCCGGCAGCCCTGCGACAGCAGCTGCCCCTGCGTGATCGCCC
AGAACTTCTGCGAGAAGTTCTGCCAGTGCAGCAGCGAGTGCCAGAACCGGTTCCCCGGCTGC
CGGTGCAAGGCCCAGTGCAACACCAAGCAGTGCCCCTGCTACCTGGCCGTGCGGGAGTGCG
ACCCCGACCTGTGCCTGACCTGCGGCGCCGCCGACCACTGGGACAGCAAGAACGTGAGCTG
CAAGAACTGCAGCATCCAGCGGGGCAGCAAGAAGCACCTGCTGCTGGCCCCCAGCGACGTG
GCCGGCTGGGGCATCTTCATCAAGGACCCCGTGCAGAAGAACGAGTTCATCAGCGAGTACT
GCGGCGAGATCATCAGCCAGGACGAGGCCGACCGGCGGGGCAAGGTGTACGACAAGTACAT
GTGCAGCTTCCTGTTCAACCTGAACAACGACTTCGTGGTGGACGCCACCCGGAAGGGCAACA
AGATCCGGTTCGCCAACCACAGCGTGAACCCCAACTGCTACGCCAAGGTGATGATGGTGAA
CGGCGACCACCGGATCGGCATCTTCGCCAAGCGGGCCATCCAGACCGGCGAGGAGCTGTTC
TTCGACTACCGGTACAGCCAGGCCGACGCCCTGAAGTACGTGGGCATCGAGCGGGAGATGG
AGATCCCCAGCACCGGCGGCAGCGGCGGCAGCGGCGGCAGCGGCGGCAGCGGCGGCAGCG
GCCGACCCGACAAGAAGTACAGCATCGGCCTGGCCATCGGCACCAACAGCGTGGGCTGGGC
CGTGATCACCGACGAGTACAAGGTGCCCAGCAAGAAGTTCAAGGTGCTGGGCAACACCGAC
CGGCACAGCATCAAGAAGAACCTGATCGGCGCCCTGCTGTTCGACAGCGGCGAGACCGCCG
AGGCCACCCGGCTGAAGCGGACCGCCCGGCGGCGGTACACCCGGCGGAAGAACCGGATCTG
CTACCTGCAGGAGATCTTCAGCAACGAGATGGCCAAGGTGGACGACAGCTTCTTCCACCGGC
TGGAGGAGAGCTTCCTGGTGGAGGAGGACAAGAAGCACGAGCGGCACCCCATCTTCGGCAA
CATCGTGGACGAGGTGGCCTACCACGAGAAGTACCCCACCATCTACCACCTGCGGAAGAAG
CTGGTGGACAGCACCGACAAGGCCGACCTGCGGCTGATCTACCTGGCCCTGGCCCACATGAT
CAAGTTCCGGGGCCACTTCCTGATCGAGGGCGACCTGAACCCCGACAACAGCGACGTGGAC
AAGCTGTTCATCCAGCTGGTGCAGACCTACAACCAGCTGTTCGAGGAGAACCCCATCAACGC
CAGCGGCGTGGACGCCAAGGCCATCCTGAGCGCCCGGCTGAGCAAGAGCCGGCGGCTGGAG
AACCTGATCGCCCAGCTGCCCGGCGAGAAGAAGAACGGCCTGTTCGGCAACCTGATCGCCC
TGAGCCTGGGCCTGACCCCCAACTTCAAGAGCAACTTCGACCTGGCCGAGGACGCCAAGCT
GCAGCTGAGCAAGGACACCTACGACGACGACCTGGACAACCTGCTGGCCCAGATCGGCGAC
CAGTACGCCGACCTGTTCCTGGCCGCCAAGAACCTGAGCGACGCCATCCTGCTGAGCGACAT
CCTGCGGGTGAACACCGAGATCACCAAGGCCCCCCTGAGCGCCAGCATGATCAAGCGGTAC
GACGAGCACCACCAGGACCTGACCCTGCTGAAGGCCCTGGTGCGGCAGCAGCTGCCCGAGA
AGTACAAGGAGATCTTCTTCGACCAGAGCAAGAACGGCTACGCCGGCTACATCGACGGCGG
CGCCAGCCAGGAGGAGTTCTACAAGTTCATCAAGCCCATCCTGGAGAAGATGGACGGCACC
GAGGAGCTGCTGGTGAAGCTGAACCGGGAGGACCTGCTGCGGAAGCAGCGGACCTTCGACA
ACGGCAGCATCCCCCACCAGATCCACCTGGGCGAGCTGCACGCCATCCTGCGGCGGCAGGA
GGACTTCTACCCCTTCCTGAAGGACAACCGGGAGAAGATCGAGAAGATCCTGACCTTCCGG
ATCCCCTACTACGTGGGCCCCCTGGCCCGGGGCAACAGCCGGTTCGCCTGGATGACCCGGAA
ATCCGAGGAGACCATCACCCCCTGGAACTTCGAGGAGGTGGTGGACAAGGGCGCCAGCGCC
CAGAGCTTCATCGAGCGGATGACCAACTTCGACAAGAACCTGCCCAACGAGAAGGTGCTGC
CCAAGCACAGCCTGCTGTACGAGTACTTCACCGTGTACAACGAGCTGACCAAGGTGAAGTA
CGTGACCGAGGGCATGCGGAAGCCCGCCTTCCTGAGCGGCGAGCAGAAGAAGGCCATCGTG
GACCTGCTGTTCAAGACCAACCGGAAGGTGACCGTGAAGCAGCTGAAGGAGGACTACTTCA
AGAAGATCGAGTGCTTCGACAGCGTGGAGATCAGCGGCGTGGAGGACCGGTTCAACGCCAG
CCTGGGCACCTACCACGACCTGCTGAAGATCATCAAGGACAAGGACTTCCTGGACAACGAG
GAGAACGAGGACATCCTGGAGGACATCGTGCTGACCCTGACCCTGTTCGAGGACCGGGAGA
TGATCGAGGAGCGGCTGAAAACCTACGCCCACCTGTTCGACGACAAGGTGATGAAGCAGCT
GAAGCGGCGGCGGTACACCGGCTGGGGCCGGCTGAGCCGGAAGCTGATCAACGGCATCCGG
GACAAGCAGAGCGGCAAGACCATCCTGGACTTCCTGAAATCCGACGGCTTCGCCAACCGGA
ACTTCATGCAGCTGATCCACGACGACAGCCTGACCTTCAAGGAGGACATCCAGAAGGCCCA
GGTGAGCGGCCAGGGCGACAGCCTGCACGAGCACATCGCCAACCTGGCCGGCAGCCCCGCC
ATCAAGAAGGGCATCCTGCAGACCGTGAAGGTGGTGGACGAGCTGGTGAAGGTGATGGGCC
GGCACAAGCCCGAGAACATCGTGATCGAGATGGCCCGGGAGAACCAGACCACCCAGAAGG
GCCAGAAGAACAGCCGGGAGCGGATGAAGCGGATCGAGGAGGGCATCAAGGAGCTGGGCA
GCCAGATCCTGAAGGAGCACCCCGTGGAGAACACCCAGCTGCAGAACGAGAAGCTGTACCT
GTACTACCTGCAGAACGGCCGGGACATGTACGTGGACCAGGAGCTGGACATCAACCGGCTG
AGCGACTACGACGTGGCCGCCATCGTGCCCCAGAGCTTCCTGAAGGACGACAGCATCGACA
ACAAGGTGCTGACCCGGAGCGACAAGGCCCGGGGCAAGAGCGACAACGTGCCCAGCGAGG
AGGTGGTGAAGAAGATGAAGAACTACTGGCGGCAGCTGCTGAACGCCAAGCTGATCACCCA
GCGGAAGTTCGACAACCTGACCAAGGCCGAGCGGGGCGGCCTGAGCGAGCTGGACAAGGCC
GGCTTCATCAAGCGGCAGCTGGTGGAGACCCGGCAGATCACCAAGCACGTGGCCCAGATCC
TGGACAGCCGGATGAACACCAAGTACGACGAGAACGACAAGCTGATCCGGGAGGTGAAGG
TGATCACCCTGAAATCCAAGCTGGTGAGCGACTTCCGGAAGGACTTCCAGTTCTACAAGGTG
CGGGAGATCAACAACTACCACCACGCCCACGACGCCTACCTGAACGCCGTGGTGGGCACCG
CCCTGATCAAGAAGTACCCCAAGCTGGAGAGCGAGTTCGTGTACGGCGACTACAAGGTGTA
CGACGTGCGGAAGATGATCGCCAAGAGCGAGCAGGAGATCGGCAAGGCCACCGCCAAGTA
CTTCTTCTACAGCAACATCATGAACTTCTTCAAGACCGAGATCACCCTGGCCAACGGCGAGA
TCCGGAAGCGGCCCCTGATCGAGACCAACGGCGAGACCGGCGAGATCGTGTGGGACAAGGG
CCGGGACTTCGCCACCGTGCGGAAGGTGCTGAGCATGCCCCAGGTGAACATCGTGAAGAAA
ACCGAGGTGCAGACCGGCGGCTTCAGCAAGGAGAGCATCCTGCCCAAGCGGAACAGCGACA
AGCTGATCGCCCGGAAGAAGGACTGGGACCCCAAGAAGTACGGCGGCTTCGACAGCCCCAC
CGTGGCCTACAGCGTGCTGGTGGTGGCCAAGGTGGAGAAGGGCAAGAGCAAGAAGCTGAA
ATCCGTGAAGGAGCTGCTGGGCATCACCATCATGGAGCGGAGCAGCTTCGAGAAGAACCCC
ATCGACTTCCTGGAGGCCAAGGGCTACAAGGAGGTGAAGAAGGACCTGATCATCAAGCTGC
CCAAGTACAGCCTGTTCGAGCTGGAGAACGGCCGGAAGCGGATGCTGGCCAGCGCCGGCGA
GCTGCAGAAGGGCAACGAGCTGGCCCTGCCCAGCAAGTACGTGAACTTCCTGTACCTGGCC
AGCCACTACGAGAAGCTGAAGGGCAGCCCCGAGGACAACGAGCAGAAGCAGCTGTTCGTGG
AGCAGCACAAGCACTACCTGGACGAGATCATCGAGCAGATCAGCGAGTTCAGCAAGCGGGT
GATCCTGGCCGACGCCAACCTGGACAAGGTGCTGAGCGCCTACAACAAGCACCGGGACAAG
CCCATCCGGGAGCAGGCCGAGAACATCATCCACCTGTTCACCCTGACCAACCTGGGCGCCCC
CGCCGCCTTCAAGTACTTCGACACCACCATCGACCGGAAGCGGTACACCAGCACCAAGGAG
GTGCTGGACGCCACCCTGATCCACCAGAGCATCACCGGCCTGTACGAGACCCGGATCGACCT
GAGCCAGCTGGGCGGCGACAGCGGCGGCAAGCGGCCCGCCGCCACCAAGAAGGCCGGCCA
GGCCAAGAAGAAGAAGTCGGGCGGGGGTGGCTCAGACGCTAAGTCTCTGACCGCTTGGAGC
AGAACACTGGTCACCTTCAAGGACGTGTTCGTCGACTTCACAAGAGAGGAGTGGAAACTGC
TGGACACCGCCCAGCAGATCCTCTATAGAAACGTCATGCTGGAGAACTACAAGAATCTGGT
GTCTCTGGGCTACCAGCTGACCAAGCCCGACGTGATTCTGAGGCTGGAGAAGGGCGAGGAG
CCTTGGCTGGTGGAGAGAGAGATCCACCAAGAAACCCACCCCGACAGCGAAACCGCCTTCG
AGATCAAGAGCAGCGTGGGAGGTGGCGGATCGGGAAAGCGGCCCGCCGCCACCAAGAAGG
CCGGTCAGGCCAAGAAGAAGAAGGGCAGCTACCCCTACGACGTGCCCGACTACGCCTGAGC
GGCCGCTTAATTAAGCTGCCTTCTGCGGGGCTTGCCTTCTGGCCATGCCCTTCTTCTCTCCCTT
GCACCTGTACCTCTTGGTCTTTGAATAAAGCCTGAGTAGGAAGTCTAGAAAAAAAAAAAAA
AAAAAAAAAAAAAAAAAAAAAAAAAAAAAAAAAAAAAAAAAAAAAAAAAAAAAAAAAA
AAAAAAAAA

[0577] In some embodiments, an expression repressor comprises the amino acid sequence of SEQ ID NOs: 42 or 77. In some embodiments, an expression repressor described herein comprises an amino acid sequence of SEQ ID NO: 42 or 77 or a sequence with at least 80, 85, 90, 95, 99, or 100% identity thereto, or having no more than 20, 19, 18, 17, 16, 15, 14, 13, 12, 11, 10, 9, 8, 7, 6, 5, 4, 3, 2, or 1 positions of difference thereto.

EZH2-dCas9-KRAB
(SEQ ID NO: 42)
MAPKKKRKVGGSGGSGQTGKKSEKGPVCWRKRVKSEYMRL
RQLKRFRRADEVKSMFSSNRQKILERTEILNQEWKQRRIQ
PVHILTSVSSLRGTRECSVTSDLDFPTQVIPLKTLNAVAS
VPIMYSWSPLQQNFMVEDETVLHNIPYMGDEVLDQDGTFI
EELIKNYDGKVHGDRECGFINDEIFVELVNALGQYNDDDD
DDDGDDPEEREEKQKDLEDHRDDKESRPPRKFPSDKIFEA
ISSMFPDKGTAEELKEKYKELTEQQLPGALPPECTPNIDG
PNAKSVQREQSLHSFHTLFCRRCFKYDCFLHPFHATPNTY
KRKNTETALDNKPCGPQCYQHLEGAKEFAAALTAERIKTP
PKRPGGRRRGRLPNNSSRPSTPTINVLESKDTDSDREAGT
ETGGENNDKEEEEKKDETSSSSEANSRCQTPIKMKPNIEP
PENVEWSGAEASMFRVLIGTYYDNFCAIARLIGTKTCRQV
YEFRVKESSIIAPAPAEDVDTPPRKKKRKHRLWAAHCRKI
QLKKDGSSNHVYNYQPCDHPRQPCDSSCPCVIAQNFCEKF
CQCSSECQNRFPGCRCKAQCNTKQCPCYLAVRECDPDLCL
TCGAADHWDSKNVSCKNCSIQRGSKKHLLLAPSDVAGWGI
FIKDPVQKNEFISEYCGEIISQDEADRRGKVYDKYMCSFL
FNLNNDFVVDATRKGNKIRFANHSVNPNCYAKVMMVNGDH
RIGIFAKRAIQTGEELFFDYRYSQADALKYVGIEREMEIP
STGGSGGSGGSGGSGGSGRPDKKYSIGLAIGTNSVGWAVI
TDEYKVPSKKFKVLGNTDRHSIKKNLIGALLFDSGETAEA
TRLKRTARRRYTRRKNRICYLQEIFSNEMAKVDDSFFHRL
EESFLVEEDKKHERHPIFGNIVDEVAYHEKYPTIYHLRKK
LVDSTDKADLRLIYLALAHMIKFRGHFLIEGDLNPDNSDV
DKLFIQLVQTYNQLFEENPINASGVDAKAILSARLSKSRR
LENLIAQLPGEKKNGLFGNLIALSLGLTPNFKSNFDLAED
AKLQLSKDTYDDDLDNLLAQIGDQYADLFLAAKNLSDAIL
LSDILRVNTEITKAPLSASMIKRYDEHHQDLTLLKALVRQ
QLPEKYKEIFFDQSKNGYAGYIDGGASQEEFYKFIKPILE
KMDGTEELLVKLNREDLLRKQRTFDNGSIPHQIHLGELHA
ILRRQEDFYPFLKDNREKIEKILTFRIPYYVGPLARGNSR
FAWMTRKSEETITPWNFEEVVDKGASAQSFIERMTNFDKN
LPNEKVLPKHSLLYEYFTVYNELTKVKYVTEGMRKPAFLS
GEQKKAIVDLLFKTNRKVTVKQLKEDYFKKIECFDSVEIS
GVEDRFNASLGTYHDLLKIIKDKDFLDNEENEDILEDIVL
TLTLFEDREMIEERLKTYAHLFDDKVMKQLKRRRYTGWGR
LSRKLINGIRDKQSGKTILDFLKSDGFANRNFMQLIHDDS
LTFKEDIQKAQVSGQGDSLHEHIANLAGSPAIKKGILQTV
KVVDELVKVMGRHKPENIVIEMARENQTTQKGQKNSRERM
KRIEEGIKELGSQILKEHPVENTQLQNEKLYLYYLQNGRD
MYVDQELDINRLSDYDVAAIVPQSFLKDDSIDNKVLTRSD
KARGKSDNVPSEEVVKKMKNYWRQLLNAKLITQRKFDNLT
KAERGGLSELDKAGFIKRQLVETRQITKHVAQILDSRMNT
KYDENDKLIREVKVITLKSKLVSDFRKDFQFYKVREINNY
HHAHDAYLNAVVGTALIKKYPKLESEFVYGDYKVYDVRKM
IAKSEQEIGKATAKYFFYSNIMNFFKTEITLANGEIRKRP
LIETNGETGEIVWDKGRDFATVRKVLSMPQVNIVKKTEVQ
TGGFSKESILPKRNSDKLIARKKDWDPKKYGGFDSPTVAY
SVLVVAKVEKGKSKKLKSVKELLGITIMERSSFEKNPIDF
LEAKGYKEVKKDLIIKLPKYSLFELENGRKRMLASAGELQ
KGNELALPSKYVNFLYLASHYEKLKGSPEDNEQKQLFVEQ
HKHYLDEIIEQISEFSKRVILADANLDKVLSAYNKHRDKP
IREQAENIIHLFTLTNLGAPAAFKYFDTTIDRKRYTSTKE
VLDATLIHQSITGLYETRIDLSQLGGDSGGKRPAATKKAG
QAKKKKSGGGGSDAKSLTAWSRTLVTFKDVFVDFTREEWK
LLDTAQQILYRNVMLENYKNLVSLGYQLTKPDVILRLEKG
EEPWLVEREIHQETHPDSETAFEIKSSVGGGGSGKRPAAT
KKAGQAKKKKGSYPYDVPDYA
EZH2-dCas9-KRAB without HA tag
(SEQ ID NO: 77)
MAPKKKRKVGGSGGSGQTGKKSEKGPVCWRKRVKSEYMRL
RQLKRFRRADEVKSMFSSNRQKILERTEILNQEWKQRRIQ
PVHILTSVSSLRGTRECSVTSDLDFPTQVIPLKTLNAVAS
VPIMYSWSPLQQNFMVEDETVLHNIPYMGDEVLDQDGTFI
EELIKNYDGKVHGDRECGFINDEIFVELVNALGQYNDDDD
DDDGDDPEEREEKQKDLEDHRDDKESRPPRKFPSDKIFEA
ISSMFPDKGTAEELKEKYKELTEQQLPGALPPECTPNIDG
PNAKSVQREQSLHSFHTLFCRRCFKYDCFLHPFHATPNTY
KRKNTETALDNKPCGPQCYQHLEGAKEFAAALTAERIKTP
PKRPGGRRRGRLPNNSSRPSTPTINVLESKDTDSDREAGT
ETGGENNDKEEEEKKDETSSSSEANSRCQTPIKMKPNIEP
PENVEWSGAEASMFRVLIGTYYDNFCAIARLIGTKTCRQV
YEFRVKESSIIAPAPAEDVDTPPRKKKRKHRLWAAHCRKI
QLKKDGSSNHVYNYQPCDHPRQPCDSSCPCVIAQNFCEKF
CQCSSECQNRFPGCRCKAQCNTKQCPCYLAVRECDPDLCL
TCGAADHWDSKNVSCKNCSIQRGSKKHLLLAPSDVAGWGI
FIKDPVQKNEFISEYCGEIISQDEADRRGKVYDKYMCSFL
FNLNNDFVVDATRKGNKIRFANHSVNPNCYAKVMMVNGDH
RIGIFAKRAIQTGEELFFDYRYSQADALKYVGIEREMEIP
STGGSGGSGGSGGSGGSGRPDKKYSIGLAIGTNSVGWAVI
TDEYKVPSKKFKVLGNTDRHSIKKNLIGALLFDSGETAEA
TRLKRTARRRYTRRKNRICYLQEIFSNEMAKVDDSFFHRL
EESFLVEEDKKHERHPIFGNIVDEVAYHEKYPTIYHLRKK
LVDSTDKADLRLIYLALAHMIKFRGHFLIEGDLNPDNSDV
DKLFIQLVQTYNQLFEENPINASGVDAKAILSARLSKSRR
LENLIAQLPGEKKNGLFGNLIALSLGLTPNFKSNFDLAED
AKLQLSKDTYDDDLDNLLAQIGDQYADLFLAAKNLSDAIL
LSDILRVNTEITKAPLSASMIKRYDEHHQDLTLLKALVRQ
QLPEKYKEIFFDQSKNGYAGYIDGGASQEEFYKFIKPILE
KMDGTEELLVKLNREDLLRKQRTFDNGSIPHQIHLGELHA
ILRRQEDFYPFLKDNREKIEKILTFRIPYYVGPLARGNSR
FAWMTRKSEETITPWNFEEVVDKGASAQSFIERMTNFDKN
LPNEKVLPKHSLLYEYFTVYNELTKVKYVTEGMRKPAFLS
GEQKKAIVDLLFKTNRKVTVKQLKEDYFKKIECFDSVEIS
GVEDRFNASLGTYHDLLKIIKDKDFLDNEENEDILEDIVL
TLTLFEDREMIEERLKTYAHLFDDKVMKQLKRRRYTGWGR
LSRKLINGIRDKQSGKTILDFLKSDGFANRNFMQLIHDDS
LTFKEDIQKAQVSGQGDSLHEHIANLAGSPAIKKGILQTV
KVVDELVKVMGRHKPENIVIEMARENQTTQKGQKNSRERM
KRIEEGIKELGSQILKEHPVENTQLQNEKLYLYYLQNGRD
MYVDQELDINRLSDYDVAAIVPQSFLKDDSIDNKVLTRSD
KARGKSDNVPSEEVVKKMKNYWRQLLNAKLITQRKFDNLT
KAERGGLSELDKAGFIKRQLVETRQITKHVAQILDSRMNT
KYDENDKLIREVKVITLKSKLVSDFRKDFQFYKVREINNY
HHAHDAYLNAVVGTALIKKYPKLESEFVYGDYKVYDVRKM
IAKSEQEIGKATAKYFFYSNIMNFFKTEITLANGEIRKRP
LIETNGETGEIVWDKGRDFATVRKVLSMPQVNIVKKTEVQ
TGGFSKESILPKRNSDKLIARKKDWDPKKYGGFDSPTVAY
SVLVVAKVEKGKSKKLKSVKELLGITIMERSSFEKNPIDF
LEAKGYKEVKKDLIIKLPKYSLFELENGRKRMLASAGELQ
KGNELALPSKYVNFLYLASHYEKLKGSPEDNEQKQLFVEQ
HKHYLDEIIEQISEFSKRVILADANLDKVLSAYNKHRDKP
IREQAENIIHLFTLTNLGAPAAFKYFDTTIDRKRYTSTKE
VLDATLIHQSITGLYETRIDLSQLGGDSGGKRPAATKKAG
QAKKKKSGGGGSDAKSLTAWSRTLVTFKDVFVDFTREEWK
LLDTAQQILYRNVMLENYKNLVSLGYQLTKPDVILRLEKG
EEPWLVEREIHQETHPDSETAFEIKSSVGGGGSGKRPAAT
KKAGQAKKKKGS

[0578] In some embodiments, an expression repressor comprises a DNA-targeting moiety comprising dCas9, e.g., an S. pyogenes dCas9, and a first repressor domain comprising G9A e.g., a G9A domain and a second repressor domain comprising KRAB, e.g., a KRAB domain. In some embodiments, the expression repressor is encoded by the nucleic acid sequence of SEQ ID NOs: 31 (e.g., a nucleic acid (e.g., cDNA) encoding the expression repressor). In some embodiments, a nucleic acid described herein comprises a nucleic acid sequence of SEQ ID NO: 31 or a sequence with at least 80, 85, 90, 95, 99, or 100% identity thereto, or having no more than 20, 19, 18, 17, 16, 15, 14, 13, 12, 11, 10, 9, 8, 7, 6, 5, 4, 3, 2, or 1 positions of difference thereto.

G9A-dCas9-KRAB (MR-29442)
(SEQ ID NO: 31)
AGGAAATAAGAGAGAAAAGAAGAGTAAGAAGAAATATAAG
AGCCACCATGGCCCCCAAGAAGAAGCGGAAGGTGGGCATC
CACGGCGTGCCCGCCGCCTCGGGCGGGGGTGGCTCAGGAA
GCGCCGCTATCGCCGAAGTGCTGCTGAATGCCAGATGCGA
TCTGCATGCCGTGAACTACCACGGCGACACCCCTCTGCAT
ATCGCCGCTAGAGAGAGCTACCATGACTGTGTGCTGCTGT
TTCTGAGCAGAGGCGCCAATCCCGAGCTCAGAAACAAAGA
GGGCGACACCGCTTGGGATCTGACACCCGAGAGATCCGAC
GTGTGGTTCGCTCTGCAACTGAATAGAAAACTGAGACTGG
GCGTCGGCAATAGGGCCATTAGAACCGAGAAGATCATCTG
TAGGGACGTGGCTAGGGGCTACGAGAACGTGCCCATCCCT
TGTGTGAACGGAGTGGATGGAGAGCCTTGCCCCGAGGATT
ACAAATACATCAGCGAGAACTGCGAAACCTCCACCATGAA
TATCGATAGAAACATTACACACCTCCAGCACTGTACATGC
GTGGACGATTGCAGCAGCAGCAACTGTCTGTGCGGCCAAC
TGAGCATCAGATGCTGGTACGACAAGGATGGCAGACTGCT
GCAAGAGTTCAACAAGATCGAACCCCCTCTGATCTTCGAG
TGTAACCAAGCTTGCAGCTGTTGGAGGAACTGCAAGAATA
GGGTCGTGCAGTCCGGAATCAAGGTGAGACTGCAGCTGTA
TAGAACAGCTAAGATGGGATGGGGAGTCAGAGCTCTGCAG
ACCATCCCCCAAGGCACATTCATCTGTGAGTACGTCGGCG
AACTCATCAGCGACGCTGAGGCCGATGTGAGGGAGGACGA
CAGCTATCTCTTCGACCTCGACAACAAGGACGGCGAGGTG
TACTGCATCGACGCTAGATATTACGGCAACATCAGCAGAT
TCATCAACCACCTCTGCGACCCCAATATCATCCCCGTGAG
AGTGTTCATGCTCCATCAAGATCTGAGATTCCCTAGGATC
GCCTTCTTCAGCTCTAGAGACATTAGAACCGGCGAGGAGC
TGGGATTCGACTACGGCGACAGGTTCTGGGACATCAAGAG
CAAGTACTTCACATGCCAATGCGGCAGCGAGAAATGCAAG
CATAGCGCCGAGGCCATTGCTCTGGAGCAGTCTAGACTGG
CTAGGCTGGACCCTCACCCCGAGCTGCTGCCCGAACTGGG
ATCTCTGCCTCCCGTGAATACCGGAGGTGGCGGATCGGGA
GACAAGAAGTACAGCATCGGCCTGGCCATCGGCACCAACA
GCGTGGGCTGGGCCGTGATCACCGACGAGTACAAGGTGCC
CAGCAAGAAGTTCAAGGTGCTGGGCAACACCGACCGGCAC
AGCATCAAGAAGAACCTGATCGGCGCCCTGCTGTTCGACA
GCGGCGAGACCGCCGAGGCCACCCGGCTGAAGCGGACCGC
CCGGCGGCGGTACACCCGGCGGAAGAACCGGATCTGCTAC
CTGCAGGAGATCTTCAGCAACGAGATGGCCAAGGTGGACG
ACAGCTTCTTCCACCGGCTGGAGGAGAGCTTCCTGGTGGA
GGAGGACAAGAAGCACGAGCGGCACCCCATCTTCGGCAAC
ATCGTGGACGAGGTGGCCTACCACGAGAAGTACCCCACCA
TCTACCACCTGCGGAAGAAGCTGGTGGACAGCACCGACAA
GGCCGACCTGCGGCTGATCTACCTGGCCCTGGCCCACATG
ATCAAGTTCCGGGGCCACTTCCTGATCGAGGGCGACCTGA
ACCCCGACAACAGCGACGTGGACAAGCTGTTCATCCAGCT
GGTGCAGACCTACAACCAGCTGTTCGAGGAGAACCCCATC
AACGCCAGCGGCGTGGACGCCAAGGCCATCCTGAGCGCCC
GGCTGAGCAAGAGCCGGCGGCTGGAGAACCTGATCGCCCA
GCTGCCCGGCGAGAAGAAGAACGGCCTGTTCGGCAACCTG
ATCGCCCTGAGCCTGGGCCTGACCCCCAACTTCAAGAGCA
ACTTCGACCTGGCCGAGGACGCCAAGCTGCAGCTGAGCAA
GGACACCTACGACGACGACCTGGACAACCTGCTGGCCCAG
ATCGGCGACCAGTACGCCGACCTGTTCCTGGCCGCCAAGA
ACCTGAGCGACGCCATCCTGCTGAGCGACATCCTGCGGGT
GAACACCGAGATCACCAAGGCCCCCCTGAGCGCCAGCATG
ATCAAGCGGTACGACGAGCACCACCAGGACCTGACCCTGC
TGAAGGCCCTGGTGCGGCAGCAGCTGCCCGAGAAGTACAA
GGAGATCTTCTTCGACCAGAGCAAGAACGGCTACGCCGGC
TACATCGACGGCGGCGCCAGCCAGGAGGAGTTCTACAAGT
TCATCAAGCCCATCCTGGAGAAGATGGACGGCACCGAGGA
GCTGCTGGTGAAGCTGAACCGGGAGGACCTGCTGCGGAAG
CAGCGGACCTTCGACAACGGCAGCATCCCCCACCAGATCC
ACCTGGGCGAGCTGCACGCCATCCTGCGGCGGCAGGAGGA
CTTCTACCCCTTCCTGAAGGACAACCGGGAGAAGATCGAG
AAGATCCTGACCTTCCGGATCCCCTACTACGTGGGCCCCC
TGGCCCGGGGCAACAGCCGGTTCGCCTGGATGACCCGGAA
ATCCGAGGAGACCATCACCCCCTGGAACTTCGAGGAGGTG
GTGGACAAGGGCGCCAGCGCCCAGAGCTTCATCGAGCGGA
TGACCAACTTCGACAAGAACCTGCCCAACGAGAAGGTGCT
GCCCAAGCACAGCCTGCTGTACGAGTACTTCACCGTGTAC
AACGAGCTGACCAAGGTGAAGTACGTGACCGAGGGCATGC
GGAAGCCCGCCTTCCTGAGCGGCGAGCAGAAGAAGGCCAT
CGTGGACCTGCTGTTCAAGACCAACCGGAAGGTGACCGTG
AAGCAGCTGAAGGAGGACTACTTCAAGAAGATCGAGTGCT
TCGACAGCGTGGAGATCAGCGGCGTGGAGGACCGGTTCAA
CGCCAGCCTGGGCACCTACCACGACCTGCTGAAGATCATC
AAGGACAAGGACTTCCTGGACAACGAGGAGAACGAGGACA
TCCTGGAGGACATCGTGCTGACCCTGACCCTGTTCGAGGA
CCGGGAGATGATCGAGGAGCGGCTGAAAACCTACGCCCAC
CTGTTCGACGACAAGGTGATGAAGCAGCTGAAGCGGCGGC
GGTACACCGGCTGGGGCCGGCTGAGCCGGAAGCTGATCAA
CGGCATCCGGGACAAGCAGAGCGGCAAGACCATCCTGGAC
TTCCTGAAATCCGACGGCTTCGCCAACCGGAACTTCATGC
AGCTGATCCACGACGACAGCCTGACCTTCAAGGAGGACAT
CCAGAAGGCCCAGGTGAGCGGCCAGGGCGACAGCCTGCAC
GAGCACATCGCCAACCTGGCCGGCAGCCCCGCCATCAAGA
AGGGCATCCTGCAGACCGTGAAGGTGGTGGACGAGCTGGT
GAAGGTGATGGGCCGGCACAAGCCCGAGAACATCGTGATC
GAGATGGCCCGGGAGAACCAGACCACCCAGAAGGGCCAGA
AGAACAGCCGGGAGCGGATGAAGCGGATCGAGGAGGGCAT
CAAGGAGCTGGGCAGCCAGATCCTGAAGGAGCACCCCGTG
GAGAACACCCAGCTGCAGAACGAGAAGCTGTACCTGTACT
ACCTGCAGAACGGCCGGGACATGTACGTGGACCAGGAGCT
GGACATCAACCGGCTGAGCGACTACGACGTGGCCGCCATC
GTGCCCCAGAGCTTCCTGAAGGACGACAGCATCGACAACA
AGGTGCTGACCCGGAGCGACAAGGCCCGGGGCAAGAGCGA
CAACGTGCCCAGCGAGGAGGTGGTGAAGAAGATGAAGAAC
TACTGGCGGCAGCTGCTGAACGCCAAGCTGATCACCCAGC
GGAAGTTCGACAACCTGACCAAGGCCGAGCGGGGCGGCCT
GAGCGAGCTGGACAAGGCCGGCTTCATCAAGCGGCAGCTG
GTGGAGACCCGGCAGATCACCAAGCACGTGGCCCAGATCC
TGGACAGCCGGATGAACACCAAGTACGACGAGAACGACAA
GCTGATCCGGGAGGTGAAGGTGATCACCCTGAAATCCAAG
CTGGTGAGCGACTTCCGGAAGGACTTCCAGTTCTACAAGG
TGCGGGAGATCAACAACTACCACCACGCCCACGACGCCTA
CCTGAACGCCGTGGTGGGCACCGCCCTGATCAAGAAGTAC
CCCAAGCTGGAGAGCGAGTTCGTGTACGGCGACTACAAGG
TGTACGACGTGCGGAAGATGATCGCCAAGAGCGAGCAGGA
GATCGGCAAGGCCACCGCCAAGTACTTCTTCTACAGCAAC
ATCATGAACTTCTTCAAGACCGAGATCACCCTGGCCAACG
GCGAGATCCGGAAGCGGCCCCTGATCGAGACCAACGGCGA
GACCGGCGAGATCGTGTGGGACAAGGGCCGGGACTTCGCC
ACCGTGCGGAAGGTGCTGAGCATGCCCCAGGTGAACATCG
TGAAGAAAACCGAGGTGCAGACCGGCGGCTTCAGCAAGGA
GAGCATCCTGCCCAAGCGGAACAGCGACAAGCTGATCGCC
CGGAAGAAGGACTGGGACCCCAAGAAGTACGGCGGCTTCG
ACAGCCCCACCGTGGCCTACAGCGTGCTGGTGGTGGCCAA
GGTGGAGAAGGGCAAGAGCAAGAAGCTGAAATCCGTGAAG
GAGCTGCTGGGCATCACCATCATGGAGCGGAGCAGCTTCG
AGAAGAACCCCATCGACTTCCTGGAGGCCAAGGGCTACAA
GGAGGTGAAGAAGGACCTGATCATCAAGCTGCCCAAGTAC
AGCCTGTTCGAGCTGGAGAACGGCCGGAAGCGGATGCTGG
CCAGCGCCGGCGAGCTGCAGAAGGGCAACGAGCTGGCCCT
GCCCAGCAAGTACGTGAACTTCCTGTACCTGGCCAGCCAC
TACGAGAAGCTGAAGGGCAGCCCCGAGGACAACGAGCAGA
AGCAGCTGTTCGTGGAGCAGCACAAGCACTACCTGGACGA
GATCATCGAGCAGATCAGCGAGTTCAGCAAGCGGGTGATC
CTGGCCGACGCCAACCTGGACAAGGTGCTGAGCGCCTACA
ACAAGCACCGGGACAAGCCCATCCGGGAGCAGGCCGAGAA
CATCATCCACCTGTTCACCCTGACCAACCTGGGCGCCCCC
GCCGCCTTCAAGTACTTCGACACCACCATCGACCGGAAGC
GGTACACCAGCACCAAGGAGGTGCTGGACGCCACCCTGAT
CCACCAGAGCATCACCGGCCTGTACGAGACCCGGATCGAC
CTGAGCCAGCTGGGCGGCGACAGCGGCGGCAAGCGGCCCG
CCGCCACCAAGAAGGCCGGCCAGGCCAAGAAGAAGAAGTC
GGGCGGGGGTGGCTCAGACGCTAAGTCTCTGACCGCTTGG
AGCAGAACACTGGTCACCTTCAAGGACGTGTTCGTCGACT
TCACAAGAGAGGAGTGGAAACTGCTGGACACCGCCCAGCA
GATCCTCTATAGAAACGTCATGCTGGAGAACTACAAGAAT
CTGGTGTCTCTGGGCTACCAGCTGACCAAGCCCGACGTGA
TTCTGAGGCTGGAGAAGGGCGAGGAGCCTTGGCTGGTGGA
GAGAGAGATCCACCAAGAAACCCACCCCGACAGCGAAACC
GCCTTCGAGATCAAGAGCAGCGTGGGAGGTGGCGGATCGG
GAAAGCGGCCCGCCGCCACCAAGAAGGCCGGTCAGGCCAA
GAAGAAGAAGGGCAGCTACCCCTACGACGTGCCCGACTAC
GCCTGAGCGGCCGCTTAATTAAGCTGCCTTCTGCGGGGCT
TGCCTTCTGGCCATGCCCTTCTTCTCTCCCTTGCACCTGT
ACCTCTTGGTCTTTGAATAAAGCCTGAGTAGGAAGTCTAG
AAAAAAAAAAAAAAAAAAAAAAAAAAAAAAAAAAAAAAAA
AAAAAAAAAAAAAAAAAAAAAAAAAAAAAAAAAAAAAAAA

[0579] In some embodiments, an expression repressor comprises the amino acid sequence of SEQ ID NOs: 43 or 78. In some embodiments, an expression repressor described herein comprises an amino acid sequence of SEQ ID NO: 42 or 77 or a sequence with at least 80, 85, 90, 95, 99, or 100% identity thereto, or having no more than 20, 19, 18, 17, 16, 15, 14, 13, 12, 11, 10, 9, 8, 7, 6, 5, 4, 3, 2, or 1 positions of difference thereto.

G9A-dCas9-KRAB
(SEQ ID NO: 43)
MAPKKKRKVGIHGVPAASGGGGSGSAAIAEVLLNARCDLH
AVNYHGDTPLHIAARESYHDCVLLFLSRGANPELRNKEGD
TAWDLTPERSDVWFALQLNRKLRLGVGNRAIRTEKIICRD
VARGYENVPIPCVNGVDGEPCPEDYKYISENCETSTMNID
RNITHLQHCTCVDDCSSSNCLCGQLSIRCWYDKDGRLLQE
FNKIEPPLIFECNQACSCWRNCKNRVVQSGIKVRLQLYRT
AKMGWGVRALQTIPQGTFICEYVGELISDAEADVREDDSY
LFDLDNKDGEVYCIDARYYGNISRFINHLCDPNIIPVRVF
MLHQDLRFPRIAFFSSRDIRTGEELGFDYGDRFWDIKSKY
FTCQCGSEKCKHSAEAIALEQSRLARLDPHPELLPELGSL
PPVNTGGGGSGDKKYSIGLAIGTNSVGWAVITDEYKVPSK
KFKVLGNTDRHSIKKNLIGALLFDSGETAEATRLKRTARR
RYTRRKNRICYLQEIFSNEMAKVDDSFFHRLEESFLVEED
KKHERHPIFGNIVDEVAYHEKYPTIYHLRKKLVDSTDKAD
LRLIYLALAHMIKFRGHFLIEGDLNPDNSDVDKLFIQLVQ
TYNQLFEENPINASGVDAKAILSARLSKSRRLENLIAQLP
GEKKNGLFGNLIALSLGLTPNFKSNFDLAEDAKLQLSKDT
YDDDLDNLLAQIGDQYADLFLAAKNLSDAILLSDILRVNT
EITKAPLSASMIKRYDEHHQDLTLLKALVRQQLPEKYKEI
FFDQSKNGYAGYIDGGASQEEFYKFIKPILEKMDGTEELL
VKLNREDLLRKQRTFDNGSIPHQIHLGELHAILRRQEDFY
PFLKDNREKIEKILTFRIPYYVGPLARGNSRFAWMTRKSE
ETITPWNFEEVVDKGASAQSFIERMTNFDKNLPNEKVLPK
HSLLYEYFTVYNELTKVKYVTEGMRKPAFLSGEQKKAIVD
LLFKTNRKVTVKQLKEDYFKKIECFDSVEISGVEDRFNAS
LGTYHDLLKIIKDKDFLDNEENEDILEDIVLTLTLFEDRE
MIEERLKTYAHLFDDKVMKQLKRRRYTGWGRLSRKLINGI
RDKQSGKTILDFLKSDGFANRNFMQLIHDDSLTFKEDIQK
AQVSGQGDSLHEHIANLAGSPAIKKGILQTVKVVDELVKV
MGRHKPENIVIEMARENQTTQKGQKNSRERMKRIEEGIKE
LGSQILKEHPVENTQLQNEKLYLYYLQNGRDMYVDQELDI
NRLSDYDVAAIVPQSFLKDDSIDNKVLTRSDKARGKSDNV
PSEEVVKKMKNYWRQLLNAKLITQRKFDNLTKAERGGLSE
LDKAGFIKRQLVETRQITKHVAQILDSRMNTKYDENDKLI
REVKVITLKSKLVSDFRKDFQFYKVREINNYHHAHDAYLN
AVVGTALIKKYPKLESEFVYGDYKVYDVRKMIAKSEQEIG
KATAKYFFYSNIMNFFKTEITLANGEIRKRPLIETNGETG
EIVWDKGRDFATVRKVLSMPQVNIVKKTEVQTGGFSKESI
LPKRNSDKLIARKKDWDPKKYGGFDSPTVAYSVLVVAKVE
KGKSKKLKSVKELLGITIMERSSFEKNPIDFLEAKGYKEV
KKDLIIKLPKYSLFELENGRKRMLASAGELQKGNELALPS
KYVNFLYLASHYEKLKGSPEDNEQKQLFVEQHKHYLDEII
EQISEFSKRVILADANLDKVLSAYNKHRDKPIREQAENII
HLFTLTNLGAPAAFKYFDTTIDRKRYTSTKEVLDATLIHQ
SITGLYETRIDLSQLGGDSGGKRPAATKKAGQAKKKKSGG
GGSDAKSLTAWSRTLVTFKDVFVDFTREEWKLLDTAQQIL
YRNVMLENYKNLVSLGYQLTKPDVILRLEKGEEPWLVERE
IHQETHPDSETAFEIKSSVGGGGSGKRPAATKKAGQAKKK
KGSYPYDVPDYA
G9A-dCas9-KRAB without HA tag
(SEQ ID NO: 78)
MAPKKKRKVGIHGVPAASGGGGSGSAAIAEVLLNARCDLH
AVNYHGDTPLHIAARESYHDCVLLFLSRGANPELRNKEGD
TAWDLTPERSDVWFALQLNRKLRLGVGNRAIRTEKIICRD
VARGYENVPIPCVNGVDGEPCPEDYKYISENCETSTMNID
RNITHLQHCTCVDDCSSSNCLCGQLSIRCWYDKDGRLLQE
FNKIEPPLIFECNQACSCWRNCKNRVVQSGIKVRLQLYRT
AKMGWGVRALQTIPQGTFICEYVGELISDAEADVREDDSY
LFDLDNKDGEVYCIDARYYGNISRFINHLCDPNIIPVRVF
MLHQDLRFPRIAFFSSRDIRTGEELGFDYGDRFWDIKSKY
FTCQCGSEKCKHSAEAIALEQSRLARLDPHPELLPELGSL
PPVNTGGGGSGDKKYSIGLAIGTNSVGWAVITDEYKVPSK
KFKVLGNTDRHSIKKNLIGALLFDSGETAEATRLKRTARR
RYTRRKNRICYLQEIFSNEMAKVDDSFFHRLEESFLVEED
KKHERHPIFGNIVDEVAYHEKYPTIYHLRKKLVDSTDKAD
LRLIYLALAHMIKFRGHFLIEGDLNPDNSDVDKLFIQLVQ
TYNQLFEENPINASGVDAKAILSARLSKSRRLENLIAQLP
GEKKNGLFGNLIALSLGLTPNFKSNFDLAEDAKLQLSKDT
YDDDLDNLLAQIGDQYADLFLAAKNLSDAILLSDILRVNT
EITKAPLSASMIKRYDEHHQDLTLLKALVRQQLPEKYKEI
FFDQSKNGYAGYIDGGASQEEFYKFIKPILEKMDGTEELL
VKLNREDLLRKQRTFDNGSIPHQIHLGELHAILRRQEDFY
PFLKDNREKIEKILTFRIPYYVGPLARGNSRFAWMTRKSE
ETITPWNFEEVVDKGASAQSFIERMTNFDKNLPNEKVLPK
HSLLYEYFTVYNELTKVKYVTEGMRKPAFLSGEQKKAIVD
LLFKTNRKVTVKQLKEDYFKKIECFDSVEISGVEDRFNAS
LGTYHDLLKIIKDKDFLDNEENEDILEDIVLTLTLFEDRE
MIEERLKTYAHLFDDKVMKQLKRRRYTGWGRLSRKLINGI
RDKQSGKTILDFLKSDGFANRNFMQLIHDDSLTFKEDIQK
AQVSGQGDSLHEHIANLAGSPAIKKGILQTVKVVDELVKV
MGRHKPENIVIEMARENQTTQKGQKNSRERMKRIEEGIKE
LGSQILKEHPVENTQLQNEKLYLYYLQNGRDMYVDQELDI
NRLSDYDVAAIVPQSFLKDDSIDNKVLTRSDKARGKSDNV
PSEEVVKKMKNYWRQLLNAKLITQRKFDNLTKAERGGLSE
LDKAGFIKRQLVETRQITKHVAQILDSRMNTKYDENDKLI
REVKVITLKSKLVSDFRKDFQFYKVREINNYHHAHDAYLN
AVVGTALIKKYPKLESEFVYGDYKVYDVRKMIAKSEQEIG
KATAKYFFYSNIMNFFKTEITLANGEIRKRPLIETNGETG
EIVWDKGRDFATVRKVLSMPQVNIVKKTEVQTGGFSKESI
LPKRNSDKLIARKKDWDPKKYGGFDSPTVAYSVLVVAKVE
KGKSKKLKSVKELLGITIMERSSFEKNPIDFLEAKGYKEV
KKDLIIKLPKYSLFELENGRKRMLASAGELQKGNELALPS
KYVNFLYLASHYEKLKGSPEDNEQKQLFVEQHKHYLDEII
EQISEFSKRVILADANLDKVLSAYNKHRDKPIREQAENII
HLFTLTNLGAPAAFKYFDTTIDRKRYTSTKEVLDATLIHQ
SITGLYETRIDLSQLGGDSGGKRPAATKKAGQAKKKKSGG
GGSDAKSLTAWSRTLVTFKDVFVDFTREEWKLLDTAQQIL
YRNVMLENYKNLVSLGYQLTKPDVILRLEKGEEPWLVERE
IHQETHPDSETAFEIKSSVGGGGSGKRPAATKKAGQAKKK
KGS

[0580] In some embodiments, an expression repressor comprises a DNA-targeting moiety comprising dCas9, e.g., an S. pyogenes dCas9, and a first repressor domain comprising FOG1 e.g., a FOG1 domain and a second repressor domain comprising FOG1, e.g., a FOG1 domain. In some embodiments, the expression repressor is encoded by the nucleic acid sequence of SEQ ID NOs: 32 (e.g., a nucleic acid (e.g., cDNA) encoding the expression repressor). In some embodiments, a nucleic acid described herein comprises a nucleic acid sequence of SEQ ID NO: 32 or a sequence with at least 80, 85, 90, 95, 99, or 100% identity thereto, or having no more than 20, 19, 18, 17, 16, 15, 14, 13, 12, 11, 10, 9, 8, 7, 6, 5, 4, 3, 2, or 1 positions of difference thereto.

FOG1-dCas9-FOG1 (MR-29434)
(SEQ ID NO: 32)
AGGAAATAAGAGAGAAAAGAAGAGTAAGAAGAAATATAAG
AGCCACCATGGCCCCCAAGAAGAAGCGGAAGGTGGGCATC
CACGGCGTGCCCGCCGCCTCGGGGGGGGTGGCTCAAGCAG
AAGGAAGCAGAGCAACCCCAGACAAATCAAGAGATCTCTG
GGCGACATGGAGGCCAGAGAGGAAGTGCAGCTGGTGGGCG
CCAGCCACATGGAGCAGAAGGCTACAGCCCCCGAGGCCCC
CAGCCCCGGAGGTGGCGGATCGGGAGACAAGAAGTACAGC
ATCGGCCTGGCCATCGGCACCAACAGCGTGGGCTGGGCCG
TGATCACCGACGAGTACAAGGTGCCCAGCAAGAAGTTCAA
GGTGCTGGGCAACACCGACCGGCACAGCATCAAGAAGAAC
CTGATCGGCGCCCTGCTGTTCGACAGCGGCGAGACCGCCG
AGGCCACCCGGCTGAAGCGGACCGCCCGGCGGCGGTACAC
CCGGCGGAAGAACCGGATCTGCTACCTGCAGGAGATCTTC
AGCAACGAGATGGCCAAGGTGGACGACAGCTTCTTCCACC
GGCTGGAGGAGAGCTTCCTGGTGGAGGAGGACAAGAAGCA
CGAGCGGCACCCCATCTTCGGCAACATCGTGGACGAGGTG
GCCTACCACGAGAAGTACCCCACCATCTACCACCTGCGGA
AGAAGCTGGTGGACAGCACCGACAAGGCCGACCTGCGGCT
GATCTACCTGGCCCTGGCCCACATGATCAAGTTCCGGGGC
CACTTCCTGATCGAGGGCGACCTGAACCCCGACAACAGCG
ACGTGGACAAGCTGTTCATCCAGCTGGTGCAGACCTACAA
CCAGCTGTTCGAGGAGAACCCCATCAACGCCAGCGGCGTG
GACGCCAAGGCCATCCTGAGCGCCCGGCTGAGCAAGAGCC
GGCGGCTGGAGAACCTGATCGCCCAGCTGCCCGGCGAGAA
GAAGAACGGCCTGTTCGGCAACCTGATCGCCCTGAGCCTG
GGCCTGACCCCCAACTTCAAGAGCAACTTCGACCTGGCCG
AGGACGCCAAGCTGCAGCTGAGCAAGGACACCTACGACGA
CGACCTGGACAACCTGCTGGCCCAGATCGGCGACCAGTAC
GCCGACCTGTTCCTGGCCGCCAAGAACCTGAGCGACGCCA
TCCTGCTGAGCGACATCCTGCGGGTGAACACCGAGATCAC
CAAGGCCCCCCTGAGCGCCAGCATGATCAAGCGGTACGAC
GAGCACCACCAGGACCTGACCCTGCTGAAGGCCCTGGTGC
GGCAGCAGCTGCCCGAGAAGTACAAGGAGATCTTCTTCGA
CCAGAGCAAGAACGGCTACGCCGGCTACATCGACGGCGGC
GCCAGCCAGGAGGAGTTCTACAAGTTCATCAAGCCCATCC
TGGAGAAGATGGACGGCACCGAGGAGCTGCTGGTGAAGCT
GAACCGGGAGGACCTGCTGCGGAAGCAGCGGACCTTCGAC
AACGGCAGCATCCCCCACCAGATCCACCTGGGCGAGCTGC
ACGCCATCCTGCGGCGGCAGGAGGACTTCTACCCCTTCCT
GAAGGACAACCGGGAGAAGATCGAGAAGATCCTGACCTTC
CGGATCCCCTACTACGTGGGCCCCCTGGCCCGGGGCAACA
GCCGGTTCGCCTGGATGACCCGGAAATCCGAGGAGACCAT
CACCCCCTGGAACTTCGAGGAGGTGGTGGACAAGGGCGCC
AGCGCCCAGAGCTTCATCGAGCGGATGACCAACTTCGACA
AGAACCTGCCCAACGAGAAGGTGCTGCCCAAGCACAGCCT
GCTGTACGAGTACTTCACCGTGTACAACGAGCTGACCAAG
GTGAAGTACGTGACCGAGGGCATGCGGAAGCCCGCCTTCC
TGAGCGGCGAGCAGAAGAAGGCCATCGTGGACCTGCTGTT
CAAGACCAACCGGAAGGTGACCGTGAAGCAGCTGAAGGAG
GACTACTTCAAGAAGATCGAGTGCTTCGACAGCGTGGAGA
TCAGCGGCGTGGAGGACCGGTTCAACGCCAGCCTGGGCAC
CTACCACGACCTGCTGAAGATCATCAAGGACAAGGACTTC
CTGGACAACGAGGAGAACGAGGACATCCTGGAGGACATCG
TGCTGACCCTGACCCTGTTCGAGGACCGGGAGATGATCGA
GGAGCGGCTGAAAACCTACGCCCACCTGTTCGACGACAAG
GTGATGAAGCAGCTGAAGCGGCGGCGGTACACCGGCTGGG
GCCGGCTGAGCCGGAAGCTGATCAACGGCATCCGGGACAA
GCAGAGCGGCAAGACCATCCTGGACTTCCTGAAATCCGAC
GGCTTCGCCAACCGGAACTTCATGCAGCTGATCCACGACG
ACAGCCTGACCTTCAAGGAGGACATCCAGAAGGCCCAGGT
GAGCGGCCAGGGCGACAGCCTGCACGAGCACATCGCCAAC
CTGGCCGGCAGCCCCGCCATCAAGAAGGGCATCCTGCAGA
CCGTGAAGGTGGTGGACGAGCTGGTGAAGGTGATGGGCCG
GCACAAGCCCGAGAACATCGTGATCGAGATGGCCCGGGAG
AACCAGACCACCCAGAAGGGCCAGAAGAACAGCCGGGAGC
GGATGAAGCGGATCGAGGAGGGCATCAAGGAGCTGGGCAG
CCAGATCCTGAAGGAGCACCCCGTGGAGAACACCCAGCTG
CAGAACGAGAAGCTGTACCTGTACTACCTGCAGAACGGCC
GGGACATGTACGTGGACCAGGAGCTGGACATCAACCGGCT
GAGCGACTACGACGTGGCCGCCATCGTGCCCCAGAGCTTC
CTGAAGGACGACAGCATCGACAACAAGGTGCTGACCCGGA
GCGACAAGGCCCGGGGCAAGAGCGACAACGTGCCCAGCGA
GGAGGTGGTGAAGAAGATGAAGAACTACTGGCGGCAGCTG
CTGAACGCCAAGCTGATCACCCAGCGGAAGTTCGACAACC
TGACCAAGGCCGAGCGGGGCGGCCTGAGCGAGCTGGACAA
GGCCGGCTTCATCAAGCGGCAGCTGGTGGAGACCCGGCAG
ATCACCAAGCACGTGGCCCAGATCCTGGACAGCCGGATGA
ACACCAAGTACGACGAGAACGACAAGCTGATCCGGGAGGT
GAAGGTGATCACCCTGAAATCCAAGCTGGTGAGCGACTTC
CGGAAGGACTTCCAGTTCTACAAGGTGCGGGAGATCAACA
ACTACCACCACGCCCACGACGCCTACCTGAACGCCGTGGT
GGGCACCGCCCTGATCAAGAAGTACCCCAAGCTGGAGAGC
GAGTTCGTGTACGGCGACTACAAGGTGTACGACGTGCGGA
AGATGATCGCCAAGAGCGAGCAGGAGATCGGCAAGGCCAC
CGCCAAGTACTTCTTCTACAGCAACATCATGAACTTCTTC
AAGACCGAGATCACCCTGGCCAACGGCGAGATCCGGAAGC
GGCCCCTGATCGAGACCAACGGCGAGACCGGCGAGATCGT
GTGGGACAAGGGCCGGGACTTCGCCACCGTGCGGAAGGTG
CTGAGCATGCCCCAGGTGAACATCGTGAAGAAAACCGAGG
TGCAGACCGGCGGCTTCAGCAAGGAGAGCATCCTGCCCAA
GCGGAACAGCGACAAGCTGATCGCCCGGAAGAAGGACTGG
GACCCCAAGAAGTACGGCGGCTTCGACAGCCCCACCGTGG
CCTACAGCGTGCTGGTGGTGGCCAAGGTGGAGAAGGGCAA
GAGCAAGAAGCTGAAATCCGTGAAGGAGCTGCTGGGCATC
ACCATCATGGAGCGGAGCAGCTTCGAGAAGAACCCCATCG
ACTTCCTGGAGGCCAAGGGCTACAAGGAGGTGAAGAAGGA
CCTGATCATCAAGCTGCCCAAGTACAGCCTGTTCGAGCTG
GAGAACGGCCGGAAGCGGATGCTGGCCAGCGCCGGCGAGC
TGCAGAAGGGCAACGAGCTGGCCCTGCCCAGCAAGTACGT
GAACTTCCTGTACCTGGCCAGCCACTACGAGAAGCTGAAG
GGCAGCCCCGAGGACAACGAGCAGAAGCAGCTGTTCGTGG
AGCAGCACAAGCACTACCTGGACGAGATCATCGAGCAGAT
CAGCGAGTTCAGCAAGCGGGTGATCCTGGCCGACGCCAAC
CTGGACAAGGTGCTGAGCGCCTACAACAAGCACCGGGACA
AGCCCATCCGGGAGCAGGCCGAGAACATCATCCACCTGTT
CACCCTGACCAACCTGGGCGCCCCCGCCGCCTTCAAGTAC
TTCGACACCACCATCGACCGGAAGCGGTACACCAGCACCA
AGGAGGTGCTGGACGCCACCCTGATCCACCAGAGCATCAC
CGGCCTGTACGAGACCCGGATCGACCTGAGCCAGCTGGGC
GGCGACAGCGGCGGCAAGCGGCCCGCCGCCACCAAGAAGG
CCGGCCAGGCCAAGAAGAAGAAGTCGGGCGGGGGTGGCTC
AAGCAGAAGGAAGCAGAGCAACCCCAGACAAATCAAGAGA
TCTCTGGGCGACATGGAGGCCAGAGAGGAAGTGCAGCTGG
TGGGCGCCAGCCACATGGAGCAGAAGGCTACAGCCCCCGA
GGCCCCCAGCCCCGGAGGTGGCGGATCGGGAAAGCGGCCC
GCCGCCACCAAGAAGGCCGGTCAGGCCAAGAAGAAGAAGG
GCAGCTACCCCTACGACGTGCCCGACTACGCCTGAGCGGC
CGCTTAATTAAGCTGCCTTCTGCGGGGCTTGCCTTCTGGC
CATGCCCTTCTTCTCTCCCTTGCACCTGTACCTCTTGGTC
TTTGAATAAAGCCTGAGTAGGAAGTCTAGAAAAAAAAAAA
AAAAAAAAAAAAAAAAAAAAAAAAAAAAAAAAAAAAAAAA
AAAAAAAAAAAAAAAAAAAAAAAAAAAAA

[0581] In some embodiments, an expression repressor comprises the amino acid sequence of SEQ ID NOs: 44 or 79. In some embodiments, an expression repressor described herein comprises an amino acid sequence of SEQ ID NO: 44 or 79 or a sequence with at least 80, 85, 90, 95, 99, or 100% identity thereto, or having no more than 20, 19, 18, 17, 16, 15, 14, 13, 12, 11, 10, 9, 8, 7, 6, 5, 4, 3, 2, or 1 positions of difference thereto.

FOG1-dCas9-FOG1
(SEQ ID NO: 44)
MAPKKKRKVGIHGVPAASGGGGSSRRKQSNPRQIKRSLGD
MEAREEVQLVGASHMEQKATAPEAPSPGGGGSGDKKYSIG
LAIGTNSVGWAVITDEYKVPSKKFKVLGNTDRHSIKKNLI
GALLFDSGETAEATRLKRTARRRYTRRKNRICYLQEIFSN
EMAKVDDSFFHRLEESFLVEEDKKHERHPIFGNIVDEVAY
HEKYPTIYHLRKKLVDSTDKADLRLIYLALAHMIKFRGHF
LIEGDLNPDNSDVDKLFIQLVQTYNQLFEENPINASGVDA
KAILSARLSKSRRLENLIAQLPGEKKNGLFGNLIALSLGL
TPNFKSNFDLAEDAKLQLSKDTYDDDLDNLLAQIGDQYAD
LFLAAKNLSDAILLSDILRVNTEITKAPLSASMIKRYDEH
HQDLTLLKALVRQQLPEKYKEIFFDQSKNGYAGYIDGGAS
QEEFYKFIKPILEKMDGTEELLVKLNREDLLRKQRTFDNG
SIPHQIHLGELHAILRRQEDFYPFLKDNREKIEKILTFRI
PYYVGPLARGNSRFAWMTRKSEETITPWNFEEVVDKGASA
QSFIERMTNFDKNLPNEKVLPKHSLLYEYFTVYNELTKVK
YVTEGMRKPAFLSGEQKKAIVDLLFKTNRKVTVKQLKEDY
FKKIECFDSVEISGVEDRFNASLGTYHDLLKIIKDKDFLD
NEENEDILEDIVLTLTLFEDREMIEERLKTYAHLFDDKVM
KQLKRRRYTGWGRLSRKLINGIRDKQSGKTILDFLKSDGF
ANRNFMQLIHDDSLTFKEDIQKAQVSGQGDSLHEHIANLA
GSPAIKKGILQTVKVVDELVKVMGRHKPENIVIEMARENQ
TTQKGQKNSRERMKRIEEGIKELGSQILKEHPVENTQLQN
EKLYLYYLQNGRDMYVDQELDINRLSDYDVAAIVPQSFLK
DDSIDNKVLTRSDKARGKSDNVPSEEVVKKMKNYWRQLLN
AKLITQRKFDNLTKAERGGLSELDKAGFIKRQLVETRQIT
KHVAQILDSRMNTKYDENDKLIREVKVITLKSKLVSDFRK
DFQFYKVREINNYHHAHDAYLNAVVGTALIKKYPKLESEF
VYGDYKVYDVRKMIAKSEQEIGKATAKYFFYSNIMNFFKT
EITLANGEIRKRPLIETNGETGEIVWDKGRDFATVRKVLS
MPQVNIVKKTEVQTGGFSKESILPKRNSDKLIARKKDWDP
KKYGGFDSPTVAYSVLVVAKVEKGKSKKLKSVKELLGITI
MERSSFEKNPIDFLEAKGYKEVKKDLIIKLPKYSLFELEN
GRKRMLASAGELQKGNELALPSKYVNFLYLASHYEKLKGS
PEDNEQKQLFVEQHKHYLDEIIEQISEFSKRVILADANLD
KVLSAYNKHRDKPIREQAENIIHLFTLTNLGAPAAFKYFD
TTIDRKRYTSTKEVLDATLIHQSITGLYETRIDLSQLGGD
SGGKRPAATKKAGQAKKKKSGGGGSSRRKQSNPRQIKRSL
GDMEAREEVQLVGASHMEQKATAPEAPSPGGGGSGKRPAA
TKKAGQAKKKKGSYPYDVPDYA
FOG1-dCas9-FOG1 without HA tag
(SEQ ID NO: 79)
MAPKKKRKVGIHGVPAASGGGGSSRRKQSNPRQIKRSLGD
MEAREEVQLVGASHMEQKATAPEAPSPGGGGSGDKKYSIG
LAIGTNSVGWAVITDEYKVPSKKFKVLGNTDRHSIKKNLI
GALLFDSGETAEATRLKRTARRRYTRRKNRICYLQEIFSN
EMAKVDDSFFHRLEESFLVEEDKKHERHPIFGNIVDEVAY
HEKYPTIYHLRKKLVDSTDKADLRLIYLALAHMIKFRGHF
LIEGDLNPDNSDVDKLFIQLVQTYNQLFEENPINASGVDA
KAILSARLSKSRRLENLIAQLPGEKKNGLFGNLIALSLGL
TPNFKSNFDLAEDAKLQLSKDTYDDDLDNLLAQIGDQYAD
LFLAAKNLSDAILLSDILRVNTEITKAPLSASMIKRYDEH
HQDLTLLKALVRQQLPEKYKEIFFDQSKNGYAGYIDGGAS
QEEFYKFIKPILEKMDGTEELLVKLNREDLLRKQRTFDNG
SIPHQIHLGELHAILRRQEDFYPFLKDNREKIEKILTFRI
PYYVGPLARGNSRFAWMTRKSEETITPWNFEEVVDKGASA
QSFIERMTNFDKNLPNEKVLPKHSLLYEYFTVYNELTKVK
YVTEGMRKPAFLSGEQKKAIVDLLFKTNRKVTVKQLKEDY
FKKIECFDSVEISGVEDRFNASLGTYHDLLKIIKDKDFLD
NEENEDILEDIVLTLTLFEDREMIEERLKTYAHLFDDKVM
KQLKRRRYTGWGRLSRKLINGIRDKQSGKTILDFLKSDGF
ANRNFMQLIHDDSLTFKEDIQKAQVSGQGDSLHEHIANLA
GSPAIKKGILQTVKVVDELVKVMGRHKPENIVIEMARENQ
TTQKGQKNSRERMKRIEEGIKELGSQILKEHPVENTQLQN
EKLYLYYLQNGRDMYVDQELDINRLSDYDVAAIVPQSFLK
DDSIDNKVLTRSDKARGKSDNVPSEEVVKKMKNYWRQLLN
AKLITQRKFDNLTKAERGGLSELDKAGFIKRQLVETRQIT
KHVAQILDSRMNTKYDENDKLIREVKVITLKSKLVSDFRK
DFQFYKVREINNYHHAHDAYLNAVVGTALIKKYPKLESEF
VYGDYKVYDVRKMIAKSEQEIGKATAKYFFYSNIMNFFKT
EITLANGEIRKRPLIETNGETGEIVWDKGRDFATVRKVLS
MPQVNIVKKTEVQTGGFSKESILPKRNSDKLIARKKDWDP
KKYGGFDSPTVAYSVLVVAKVEKGKSKKLKSVKELLGITI
MERSSFEKNPIDFLEAKGYKEVKKDLIIKLPKYSLFELEN
GRKRMLASAGELQKGNELALPSKYVNFLYLASHYEKLKGS
PEDNEQKQLFVEQHKHYLDEIIEQISEFSKRVILADANLD
KVLSAYNKHRDKPIREQAENIIHLFTLTNLGAPAAFKYFD
TTIDRKRYTSTKEVLDATLIHQSITGLYETRIDLSQLGGD
SGGKRPAATKKAGQAKKKKSGGGGSSRRKQSNPRQIKRSL
GDMEAREEVQLVGASHMEQKATAPEAPSPGGGGSGKRPAA
TKKAGQAKKKKGS

[0582] In some embodiments, an expression repressor comprises a DNA-targeting moiety comprising dCas9, e.g., an S. pyogenes dCas9, and a repressor domain comprising DNMT, e.g., a DNMT3b domain. In some embodiments, the expression repressor is encoded by the nucleic acid sequence of SEQ ID NOs: 15 (e.g., a nucleic acid (e.g., cDNA) encoding the expression repressor). In some embodiments, a nucleic acid described herein comprises a nucleic acid sequence of SEQ ID NO: 15 or a sequence with at least 80, 85, 90, 95, 99, or 100% identity thereto, or having no more than 20, 19, 18, 17, 16, 15, 14, 13, 12, 11, 10, 9, 8, 7, 6, 5, 4, 3, 2, or 1 positions of difference thereto.

dCas9-DNMT3b
(SEQ ID NO: 15)
AGGAAATAAGAGAGAAAAGAAGAGTAAGAAGAAATATAAG
AGCCACCATGGCCCCCAAGAAGAAGCGGAAGGTGGGCATC
CACGGCGTGCCCGCCGCCGACAAGAAGTACAGCATCGGCC
TGGCCATCGGCACCAACAGCGTGGGCTGGGCCGTGATCAC
CGACGAGTACAAGGTGCCCAGCAAGAAGTTCAAGGTGCTG
GGCAACACCGACCGGCACAGCATCAAGAAGAACCTGATCG
GCGCCCTGCTGTTCGACAGCGGCGAGACCGCCGAGGCCAC
CCGGCTGAAGCGGACCGCCCGGCGGCGGTACACCCGGCGG
AAGAACCGGATCTGCTACCTGCAGGAGATCTTCAGCAACG
AGATGGCCAAGGTGGACGACAGCTTCTTCCACCGGCTGGA
GGAGAGCTTCCTGGTGGAGGAGGACAAGAAGCACGAGCGG
CACCCCATCTTCGGCAACATCGTGGACGAGGTGGCCTACC
ACGAGAAGTACCCCACCATCTACCACCTGCGGAAGAAGCT
GGTGGACAGCACCGACAAGGCCGACCTGCGGCTGATCTAC
CTGGCCCTGGCCCACATGATCAAGTTCCGGGGCCACTTCC
TGATCGAGGGCGACCTGAACCCCGACAACAGCGACGTGGA
CAAGCTGTTCATCCAGCTGGTGCAGACCTACAACCAGCTG
TTCGAGGAGAACCCCATCAACGCCAGCGGCGTGGACGCCA
AGGCCATCCTGAGCGCCCGGCTGAGCAAGAGCCGGCGGCT
GGAGAACCTGATCGCCCAGCTGCCCGGCGAGAAGAAGAAC
GGCCTGTTCGGCAACCTGATCGCCCTGAGCCTGGGCCTGA
CCCCCAACTTCAAGAGCAACTTCGACCTGGCCGAGGACGC
CAAGCTGCAGCTGAGCAAGGACACCTACGACGACGACCTG
GACAACCTGCTGGCCCAGATCGGCGACCAGTACGCCGACC
TGTTCCTGGCCGCCAAGAACCTGAGCGACGCCATCCTGCT
GAGCGACATCCTGCGGGTGAACACCGAGATCACCAAGGCC
CCCCTGAGCGCCAGCATGATCAAGCGGTACGACGAGCACC
ACCAGGACCTGACCCTGCTGAAGGCCCTGGTGCGGCAGCA
GCTGCCCGAGAAGTACAAGGAGATCTTCTTCGACCAGAGC
AAGAACGGCTACGCCGGCTACATCGACGGCGGCGCCAGCC
AGGAGGAGTTCTACAAGTTCATCAAGCCCATCCTGGAGAA
GATGGACGGCACCGAGGAGCTGCTGGTGAAGCTGAACCGG
GAGGACCTGCTGCGGAAGCAGCGGACCTTCGACAACGGCA
GCATCCCCCACCAGATCCACCTGGGCGAGCTGCACGCCAT
CCTGCGGCGGCAGGAGGACTTCTACCCCTTCCTGAAGGAC
AACCGGGAGAAGATCGAGAAGATCCTGACCTTCCGGATCC
CCTACTACGTGGGCCCCCTGGCCCGGGGCAACAGCCGGTT
CGCCTGGATGACCCGGAAATCCGAGGAGACCATCACCCCC
TGGAACTTCGAGGAGGTGGTGGACAAGGGCGCCAGCGCCC
AGAGCTTCATCGAGCGGATGACCAACTTCGACAAGAACCT
GCCCAACGAGAAGGTGCTGCCCAAGCACAGCCTGCTGTAC
GAGTACTTCACCGTGTACAACGAGCTGACCAAGGTGAAGT
ACGTGACCGAGGGCATGCGGAAGCCCGCCTTCCTGAGCGG
CGAGCAGAAGAAGGCCATCGTGGACCTGCTGTTCAAGACC
AACCGGAAGGTGACCGTGAAGCAGCTGAAGGAGGACTACT
TCAAGAAGATCGAGTGCTTCGACAGCGTGGAGATCAGCGG
CGTGGAGGACCGGTTCAACGCCAGCCTGGGCACCTACCAC
GACCTGCTGAAGATCATCAAGGACAAGGACTTCCTGGACA
ACGAGGAGAACGAGGACATCCTGGAGGACATCGTGCTGAC
CCTGACCCTGTTCGAGGACCGGGAGATGATCGAGGAGCGG
CTGAAAACCTACGCCCACCTGTTCGACGACAAGGTGATGA
AGCAGCTGAAGCGGCGGCGGTACACCGGCTGGGGCCGGCT
GAGCCGGAAGCTGATCAACGGCATCCGGGACAAGCAGAGC
GGCAAGACCATCCTGGACTTCCTGAAATCCGACGGCTTCG
CCAACCGGAACTTCATGCAGCTGATCCACGACGACAGCCT
GACCTTCAAGGAGGACATCCAGAAGGCCCAGGTGAGCGGC
CAGGGCGACAGCCTGCACGAGCACATCGCCAACCTGGCCG
GCAGCCCCGCCATCAAGAAGGGCATCCTGCAGACCGTGAA
GGTGGTGGACGAGCTGGTGAAGGTGATGGGCCGGCACAAG
CCCGAGAACATCGTGATCGAGATGGCCCGGGAGAACCAGA
CCACCCAGAAGGGCCAGAAGAACAGCCGGGAGCGGATGAA
GCGGATCGAGGAGGGCATCAAGGAGCTGGGCAGCCAGATC
CTGAAGGAGCACCCCGTGGAGAACACCCAGCTGCAGAACG
AGAAGCTGTACCTGTACTACCTGCAGAACGGCCGGGACAT
GTACGTGGACCAGGAGCTGGACATCAACCGGCTGAGCGAC
TACGACGTGGCCGCCATCGTGCCCCAGAGCTTCCTGAAGG
ACGACAGCATCGACAACAAGGTGCTGACCCGGAGCGACAA
GGCCCGGGGCAAGAGCGACAACGTGCCCAGCGAGGAGGTG
GTGAAGAAGATGAAGAACTACTGGCGGCAGCTGCTGAACG
CCAAGCTGATCACCCAGCGGAAGTTCGACAACCTGACCAA
GGCCGAGCGGGGCGGCCTGAGCGAGCTGGACAAGGCCGGC
TTCATCAAGCGGCAGCTGGTGGAGACCCGGCAGATCACCA
AGCACGTGGCCCAGATCCTGGACAGCCGGATGAACACCAA
GTACGACGAGAACGACAAGCTGATCCGGGAGGTGAAGGTG
ATCACCCTGAAATCCAAGCTGGTGAGCGACTTCCGGAAGG
ACTTCCAGTTCTACAAGGTGCGGGAGATCAACAACTACCA
CCACGCCCACGACGCCTACCTGAACGCCGTGGTGGGCACC
GCCCTGATCAAGAAGTACCCCAAGCTGGAGAGCGAGTTCG
TGTACGGCGACTACAAGGTGTACGACGTGCGGAAGATGAT
CGCCAAGAGCGAGCAGGAGATCGGCAAGGCCACCGCCAAG
TACTTCTTCTACAGCAACATCATGAACTTCTTCAAGACCG
AGATCACCCTGGCCAACGGCGAGATCCGGAAGCGGCCCCT
GATCGAGACCAACGGCGAGACCGGCGAGATCGTGTGGGAC
AAGGGCCGGGACTTCGCCACCGTGCGGAAGGTGCTGAGCA
TGCCCCAGGTGAACATCGTGAAGAAAACCGAGGTGCAGAC
CGGCGGCTTCAGCAAGGAGAGCATCCTGCCCAAGCGGAAC
AGCGACAAGCTGATCGCCCGGAAGAAGGACTGGGACCCCA
AGAAGTACGGCGGCTTCGACAGCCCCACCGTGGCCTACAG
CGTGCTGGTGGTGGCCAAGGTGGAGAAGGGCAAGAGCAAG
AAGCTGAAATCCGTGAAGGAGCTGCTGGGCATCACCATCA
TGGAGCGGAGCAGCTTCGAGAAGAACCCCATCGACTTCCT
GGAGGCCAAGGGCTACAAGGAGGTGAAGAAGGACCTGATC
ATCAAGCTGCCCAAGTACAGCCTGTTCGAGCTGGAGAACG
GCCGGAAGCGGATGCTGGCCAGCGCCGGCGAGCTGCAGAA
GGGCAACGAGCTGGCCCTGCCCAGCAAGTACGTGAACTTC
CTGTACCTGGCCAGCCACTACGAGAAGCTGAAGGGCAGCC
CCGAGGACAACGAGCAGAAGCAGCTGTTCGTGGAGCAGCA
CAAGCACTACCTGGACGAGATCATCGAGCAGATCAGCGAG
TTCAGCAAGCGGGTGATCCTGGCCGACGCCAACCTGGACA
AGGTGCTGAGCGCCTACAACAAGCACCGGGACAAGCCCAT
CCGGGAGCAGGCCGAGAACATCATCCACCTGTTCACCCTG
ACCAACCTGGGCGCCCCCGCCGCCTTCAAGTACTTCGACA
CCACCATCGACCGGAAGCGGTACACCAGCACCAAGGAGGT
GCTGGACGCCACCCTGATCCACCAGAGCATCACCGGCCTG
TACGAGACCCGGATCGACCTGAGCCAGCTGGGCGGCGACA
GCGGCGGCAAGCGGCCCGCCGCCACCAAGAAGGCCGGCCA
GGCCAAGAAGAAGAAGTCGGGCGGGGGTGGCTCAGTGGAC
GTGCTGAGGAGAAGGAAGGACTGGAACGTGAGACTGCAAG
CCTTCTTCACCAGCGACACCGGACTGGAATACGAGGCCCC
TAAGCTGTACCCCGCCATTCCCGCCGCTAGACGCAGACCC
ATTAGAGTGCTCTCTCTGTTTGACGGAATCGCCACCGGCT
ATCTGGTGCTGAAAGAGCTGGGCATCAAGGTGGGCAAATA
CGTGGCCAGCGAGGTGTGCGAGGAGTCTATCGCCGTCGGA
ACCGTGAAACACGAGGGAAACATCAAATACGTGAACGACG
TGAGGAACATCACCAAGAAAAACATCGAGGAGTGGGGCCC
CTTCGATCTCGTGATCGGCGGCAGCCCTTGCAACGATCTC
TCCAATGTGAACCCCGCCAGAAAGGGACTGTACGAGGGCA
CCGGCAGACTGTTCTTCGAGTTCTACCATCTGCTGAACTA
CAGCAGACCCAAGGAGGGCGACGACAGACCCTTCTTCTGG
ATGTTCGAAAACGTGGTCGCCATGAAGGTGGGCGATAAGA
GGGACATCAGCAGATTTCTGGAGTGTAACCCCGTCATGAT
CGATGCCATTAAGGTCAGCGCCGCCCACAGAGCTAGGTAC
TTCTGGGGAAATCTGCCCGGCATGAATAGACCCGTGATCG
CTTCCAAGAACGACAAGCTGGAGCTGCAAGACTGTCTGGA
GTACAATAGAATCGCTAAGCTCAAGAAGGTCCAGACCATC
ACCACAAAATCCAACAGCATCAAGCAAGGCAAGAACCAGC
TGTTCCCCGTGGTCATGAACGGCAAGGAGGATGTGCTCTG
GTGCACCGAGCTGGAGAGGATCTTTGGCTTCCCCGTGCAC
TATACCGATGTGTCCAACATGGGAAGAGGCGCTAGACAGA
AACTGCTGGGAAGAAGCTGGAGCGTGCCCGTGATTAGACA
CCTCTTCGCCCCTCTGAAGGATTACTTCGCTTGCGAGGGA
GGTGGCGGATCGGGAAAGCGGCCCGCCGCCACCAAGAAGG
CCGGTCAGGCCAAGAAGAAGAAGGGCAGCTACCCCTACGA
CGTGCCCGACTACGCCTGAGCGGCCGCTTAATTAAGCTGC
CTTCTGCGGGGCTTGCCTTCTGGCCATGCCCTTCTTCTCT
CCCTTGCACCTGTACCTCTTGGTCTTTGAATAAAGCCTGA
GTAGGAAGTCTAGAAAAAAAAAAAAAAAAAAAAAAAAAAA
AAAAAAAAAAAAAAAAAAAAAAAAAAAAAAAAAAAAAAAA
AAAAAAAAAAAAA

[0583] In some embodiments, an expression repressor comprises the amino acid sequence of SEQ ID NOs: 16 or 37. In some embodiments, an expression repressor described herein comprises an amino acid sequence of SEQ ID NO: 16 or 37 or a sequence with at least 80, 85, 90, 95, 99, or 100% identity thereto, or having no more than 20, 19, 18, 17, 16, 15, 14, 13, 12, 11, 10, 9, 8, 7, 6, 5, 4, 3, 2, or 1 positions of difference thereto.

dCas9-DNMT3b
(SEQ ID NO: 16)
MAPKKKRKVGIHGVPAADKKYSIGLAIGTNSVGWAVITDE
YKVPSKKFKVLGNTDRHSIKKNLI
GALLFDSGETAEATRLKRTARRRYTRRKNRICYLQEIFSN
EMAKVDDSFFHRLEESFLVEEDKKHERHPIFGNIVDEVAY
HEKYPTIYHLRKKLVDSTDKADLRLIYLALAHMIKFRGHF
LIEGDLNPDNSDVDKLFIQLVQTYNQLFEENPINASGVDA
KAILSARLSKSRRLENLIAQLPGEKKNGLFGNLIALSLGL
TPNFKSNFDLAEDAKLQLSKDTYDDDLDNLLAQIGDQYAD
LFLAAKNLSDAILLSDILRVNTEITKAPLSASMIKRYDEH
HQDLTLLKALVRQQLPEKYKEIFFDQSKNGYAGYIDGGAS
QEEFYKFIKPILEKMDGTEELLVKLNREDLLRKQRTFDNG
SIPHQIHLGELHAILRRQEDFYPFLKDNREKIEKILTFRI
PYYVGPLARGNSRFAWMTRKSEETITPWNFEEVVDKGASA
QSFIERMTNFDKNLPNEKVLPKHSLLYEYFTVYNELTKVK
YVTEGMRKPAFLSGEQKKAIVDLLFKTNRKVTVKQLKEDY
FKKIECFDSVEISGVEDRFNASLGTYHDLLKIIKDKDFLD
NEENEDILEDIVLTLTLFEDREMIEERLKTYAHLFDDKVM
KQLKRRRYTGWGRLSRKLINGIRDKQSGKTILDFLKSDGF
ANRNFMQLIHDDSLTFKEDIQKAQVSGQGDSLHEHIANLA
GSPAIKKGILQTVKVVDELVKVMGRHKPENIVIEMARENQ
TTQKGQKNSRERMKRIEEGIKELGSQILKEHPVENTQLQN
EKLYLYYLQNGRDMYVDQELDINRLSDYDVAAIVPQSFLK
DDSIDNKVLTRSDKARGKSDNVPSEEVVKKMKNYWRQLLN
AKLITQRKFDNLTKAERGGLSELDKAGFIKRQLVETRQIT
KHVAQILDSRMNTKYDENDKLIREVKVITLKSKLVSDFRK
DFQFYKVREINNYHHAHDAYLNAVVGTALIKKYPKLESEF
VYGDYKVYDVRKMIAKSEQEIGKATAKYFFYSNIMNFFKT
EITLANGEIRKRPLIETNGETGEIVWDKGRDFATVRKVLS
MPQVNIVKKTEVQTGGFSKESILPKRNSDKLIARKKDWDP
KKYGGFDSPTVAYSVLVVAKVEKGKSKKLKSVKELLGITI
MERSSFEKNPIDFLEAKGYKEVKKDLIIKLPKYSLFELEN
GRKRMLASAGELQKGNELALPSKYVNFLYLASHYEKLKGS
PEDNEQKQLFVEQHKHYLDEIIEQISEFSKRVILADANLD
KVLSAYNKHRDKPIREQAENIIHLFTLTNLGAPAAFKYFD
TTIDRKRYTSTKEVLDATLIHQSITGLYETRIDLSQLGGD
SGGKRPAATKKAGQAKKKKSGGGGSVDVLRRRKDWNVRLQ
AFFTSDTGLEYEAPKLYPAIPAARRRPIRVLSLFDGIATG
YLVLKELGIKVGKYVASEVCEESIAVGTVKHEGNIKYVND
VRNITKKNIEEWGPFDLVIGGSPCNDLSNVNPARKGLYEG
TGRLFFEFYHLLNYSRPKEGDDRPFFWMFENVVAMKVGDK
RDISRFLECNPVMIDAIKVSAAHRARYFWGNLPGMNRPVI
ASKNDKLELQDCLEYNRIAKLKKVQTITTKSNSIKQGKNQ
LFPVVMNGKEDVLWCTELERIFGFPVHYTDVSNMGRGARQ
KLLGRSWSVPVIRHLFAPLKDYFACEGGGGSGKRPAATKK
AGQAKKKKGSYPYDVPDYA
dCas9-DNMT3b without HA tag
(SEQ ID NO: 37)
MAPKKKRKVGIHGVPAADKKYSIGLAIGTNSVGWAVITDE
YKVPSKKFKVLGNTDRHSIKKNLIGALLFDSGETAEATRL
KRTARRRYTRRKNRICYLQEIFSNEMAKVDDSFFHRLEES
FLVEEDKKHERHPIFGNIVDEVAYHEKYPTIYHLRKKLVD
STDKADLRLIYLALAHMIKFRGHFLIEGDLNPDNSDVDKL
FIQLVQTYNQLFEENPINASGVDAKAILSARLSKSRRLEN
LIAQLPGEKKNGLFGNLIALSLGLTPNFKSNFDLAEDAKL
QLSKDTYDDDLDNLLAQIGDQYADLFLAAKNLSDAILLSD
ILRVNTEITKAPLSASMIKRYDEHHQDLTLLKALVRQQLP
EKYKEIFFDQSKNGYAGYIDGGASQEEFYKFIKPILEKMD
GTEELLVKLNREDLLRKQRTFDNGSIPHQIHLGELHAILR
RQEDFYPFLKDNREKIEKILTFRIPYYVGPLARGNSRFAW
MTRKSEETITPWNFEEVVDKGASAQSFIERMTNFDKNLPN
EKVLPKHSLLYEYFTVYNELTKVKYVTEGMRKPAFLSGEQ
KKAIVDLLFKTNRKVTVKQLKEDYFKKIECFDSVEISGVE
DRFNASLGTYHDLLKIIKDKDFLDNEENEDILEDIVLTLT
LFEDREMIEERLKTYAHLFDDKVMKQLKRRRYTGWGRLSR
KLINGIRDKQSGKTILDFLKSDGFANRNFMQLIHDDSLTF
KEDIQKAQVSGQGDSLHEHIANLAGSPAIKKGILQTVKVV
DELVKVMGRHKPENIVIEMARENQTTQKGQKNSRERMKRI
EEGIKELGSQILKEHPVENTQLQNEKLYLYYLQNGRDMYV
DQELDINRLSDYDVAAIVPQSFLKDDSIDNKVLTRSDKAR
GKSDNVPSEEVVKKMKNYWRQLLNAKLITQRKFDNLTKAE
RGGLSELDKAGFIKRQLVETRQITKHVAQILDSRMNTKYD
ENDKLIREVKVITLKSKLVSDFRKDFQFYKVREINNYHHA
HDAYLNAVVGTALIKKYPKLESEFVYGDYKVYDVRKMIAK
SEQEIGKATAKYFFYSNIMNFFKTEITLANGEIRKRPLIE
TNGETGEIVWDKGRDFATVRKVLSMPQVNIVKKTEVQTGG
FSKESILPKRNSDKLIARKKDWDPKKYGGFDSPTVAYSVL
VVAKVEKGKSKKLKSVKELLGITIMERSSFEKNPIDFLEA
KGYKEVKKDLIIKLPKYSLFELENGRKRMLASAGELQKGN
ELALPSKYVNFLYLASHYEKLKGSPEDNEQKQLFVEQHKH
YLDEIIEQISEFSKRVILADANLDKVLSAYNKHRDKPIRE
QAENIIHLFTLTNLGAPAAFKYFDTTIDRKRYTSTKEVLD
ATLIHQSITGLYETRIDLSQLGGDSGGKRPAATKKAGQAK
KKKSGGGGSVDVLRRRKDWNVRLQAFFTSDTGLEYEAPKL
YPAIPAARRRPIRVLSLFDGIATGYLVLKELGIKVGKYVA
SEVCEESIAVGTVKHEGNIKYVNDVRNITKKNIEEWGPFD
LVIGGSPCNDLSNVNPARKGLYEGTGRLFFEFYHLLNYSR
PKEGDDRPFFWMFENVVAMKVGDKRDISRFLECNPVMIDA
IKVSAAHRARYFWGNLPGMNRPVIASKNDKLELQDCLEYN
RIAKLKKVQTITTKSNSIKQGKNQLFPVVMNGKEDVLWCT
ELERIFGFPVHYTDVSNMGRGARQKLLGRSWSVPVIRHLF
APLKDYFACEGGGGSGKRPAATKKAGQAKKKKGS

[0584] Functional Characteristics

[0585] An expression repression system of the present disclosure can be used to decrease expression of a target gene in a cell. In some embodiments, decreasing expression comprises decreasing the level of RNA, e.g., mRNA, encoded by the target gene. In some embodiments, decreasing expression comprises decreasing the level of a protein encoded by the target gene. In some embodiments, decreasing expression comprises both decreasing the level of mRNA and protein encoded by the target gene. In some embodiments, the expression of a target gene in a cell contacted by or comprising the expression repression system is at least 1.05× (i.e., 1.05 times), 1.1×, 1.15×, 1.2×, 1.25×, 1.3×, 1.35×, 1.4×, 1.45×, 1.5×, 1.55×, 1.6×, 1.65×, 1.7×, 1.75×, 1.8×, 1.85×, 1.9×, 1.95×, 2×, 3×, 4×, 5×, 6×, 7×, 8×, 9×, 10×, 20×, 30×, 40×, 50×, 60×, 70×, 80×, 90×, or 100× lower than the level of expression of the target gene in a cell not contacted by or comprising the expression repression system. Expression of a target gene may be assayed by methods known to those of skill in the art, including RT-PCR, ELISA, Western blot, and the methods of Examples 2-4.

[0586] An expression repression system of the present disclosure can be used to decrease expression of a target gene in a cell for a time period. In some embodiments, the expression of a target gene in a cell contacted by or comprising the expression repression system is appreciably decreased for at least 1, 2, 3, 4, 5, 6, 7, 8, 9, 10, 11, 12, 13, 14, 15, 16, 17, 18, 19, 20, 21, 22, 23, or 24 hours, or at least 1, 2, 3, 4, 5, 6, 7, 10, or 14 days, or at least 1, 2, 3, 4, or 5 weeks, or at least 1, 2, 3, 4, 5, 6, 7, 8, 9, 10, 11, or 12 months, or at least 1, 2, 3, 4, or 5 years (e.g., indefinitely). Optionally, the expression of a target gene in a cell contacted by or comprising the expression repression system is appreciably decreased for no more than 10, 9, 8, 7, 6, 5, 4, 3, 2, or 1 years.

[0587] In some embodiments, the expression of a target in a cell contacted by or comprising the expression repressor or the system is appreciably decreased for at least 1, 2, 3, 4, 5, 6, 7, 8, 9, or 10 cell divisions. An expression repressor or a system of the present disclosure can be used to methylate CpG nucleotides in a target region. In some embodiments, the methylation persists for at least 1 days, at least 2 days, at least 5 days, at least 7 days, at least 10 days, at least 15 days, or at least 22 days post-treatment with an expression repressor or an expression repression system disclosed herein.

[0588] An expression repression system may comprise a plurality of expression repressors, where each expression repressor comprises a repressor domain with a different functionality than the repressor domain of another expression repressor. For example, an expression repression system may comprise two expression repressors, where the first expression repressor comprises a first repressor domain comprising histone deacetylase functionality and the second expression repressor comprises a second repressor domain comprising DNA methyltransferase functionality. In some embodiments, an expression repression system comprises expression repressors comprising a combination of repressor domains whose functionalities are complementary to one another with regard to inhibiting expression of a target gene, e.g., where the functionalities together enable inhibition of expression and, optionally, do not inhibit or negligibly inhibit expression when present individually. In some embodiments, an expression repression system comprises a plurality of expression repressors, wherein each expression repressor comprises a repressor domain that complements the repressor domains of each other expression repressor, e.g., each repressor domain decreases expression of a target gene.

[0589] In some embodiments, an expression repression system comprises expression repressors comprising a combination of repressor domains whose functionalities synergize with one another with regard to inhibiting expression of a target gene. Without wishing to be bound by theory, it is thought that epigenetic modifications to a genomic locus are cumulative, in that multiple repressive epigenetic markers (e.g., multiple different types of epigenetic markers and/or more extensive marking of a given type) individually together reduce expression more effectively than individual modifications alone (e.g., producing a greater decrease in expression and/or a longer-lasting decrease in expression). In some embodiments, an expression repression system comprises a plurality of expression repressors, wherein each expression repressor comprises a repressor domain that synergizes with the repressor domains of each other expression repressor, e.g., each repressor domain decreases expression of a target gene. In some embodiments, an expression repression system (comprising a plurality of expression repressors comprising a plurality of different repressor domains which synergize with one another) is more effective at inhibiting expression of a target gene than an individual expression repressor, e.g., and its single repressor domain. In some embodiments, an expression repression system is at least 1.05× (i.e., 1.05 times), 1.1×, 1.15×, 1.2×, 1.25×, 1.3×, 1.35×, 1.4×, 1.45×, 1.5×, 1.55×, 1.6×, 1.65×, 1.7×, 1.75×, 1.8×, 1.85×, 1.9×, 1.95×, 2×, 3×, 4×, 5×, 6×, 7×, 8×, 9×, 10×, 20×, 30×, 40×, 50×, 60×, 70×, 80×, 90×, or 100× as effective at inhibiting expression of a target gene than an individual expression repressor. The level of an epigenetic marker may be assayed by methods known to those of skill in the art, including whole genome bisulfite sequencing, reduced representation bisulfite sequencing, bisulfite amplicon sequencing, methylation arrays, pyrosequencing, ChIP-seq, or ChIP-qPCR.

[0590] Combinations of Repressors

[0591] In some embodiments, an expression repression system comprises a first expression repressor comprising a first repressor domain and a second expression repressor comprising a second repressor domain wherein the first repressor domain and second repressor domain are different from one another. In some embodiments, the first repressor domain is or comprises a first epigenetic modifying moiety (e.g., that increases or decreases a first epigenetic marker) or functional fragment thereof and the second repressor domain is or comprises a second epigenetic modifying moiety (e.g., that increases or decreases a second epigenetic marker) or functional fragment thereof. In some embodiments, the first repressor domain is or comprises a histone methyltransferase or functional fragment thereof and the second repressor domain is or comprises a DNA methyltransferase or functional fragment thereof. In some embodiments, the first repressor domain is or comprises a histone deacetylase or functional fragment thereof and the second repressor domain is or comprises a DNA methyltransferase or functional fragment thereof. In some embodiments, the first repressor domain is or comprises a histone deacetylase or functional fragment thereof and the second repressor domain is or comprises a histone methyltransferase or functional fragment thereof.

[0592] In some embodiments, the first repressor domain is or comprises KRAB (e.g., a KRAB domain), a SET domain (e.g., the SET domain of SETDB1 EZH2, G9A, or SUV39H1), histone demethylase LSD1, FOG1 (e.g., the N-terminal residues of FOG1), HDAC8, MQ1, DNMT1, DNMT3a/31, or KAP1, or a functional fragment of any thereof, and the second repressor domain is or comprises KRAB (e.g., a KRAB domain), a SET domain (e.g., the SET domain of SETDB1 EZH2, G9A, or SUV39H1), histone demethylase LSD1, FOG1 (e.g., the N-terminal residues of FOG1), DNMT3A (e.g., human DNMT3A), DNMT3B, DNMT3L, DNMT3A/3L complex, or bacterial MQ1, or a functional fragment of any thereof.

[0593] In some embodiments, the first repressor domain is or comprises KRAB or a functional variant or fragment thereof, and the second repressor domain is or comprises bacterial MQ1 or a functional variant or fragment thereof.

[0594] In some embodiments, the first repressor domain is or comprises KRAB or a functional variant or fragment thereof, and the second repressor domain is or comprises DNMT3A or a functional variant or fragment thereof.

[0595] In some embodiments, the first repressor domain is or comprises KRAB or a functional variant or fragment thereof, and the second repressor domain is or comprises DNMT3B or a functional variant or fragment thereof.

[0596] In some embodiments, the first repressor domain is or comprises KRAB or a functional variant or fragment thereof, and the second repressor domain is or comprises DNMT3L or a functional variant or fragment thereof.

[0597] In some embodiments, the first repressor domain is or comprises KRAB or a functional variant or fragment thereof, and the second repressor domain is or comprises DNMT3A/3L complex or a functional variant or fragment thereof.

[0598] In some embodiments, the first repressor domain is or comprises a SET domain or a functional variant or fragment thereof, and the second repressor domain is or comprises bacterial MQ1 or a functional variant or fragment thereof.

[0599] In some embodiments, the first repressor domain is or comprises LSD1 or a functional variant or fragment thereof, and the second repressor domain is or comprises bacterial MQ1 or a functional variant or fragment thereof.

[0600] In some embodiments, the first repressor domain is or comprises FOG1 or a functional variant or fragment thereof, and the second repressor domain is or comprises bacterial MQ1 or a functional variant or fragment thereof.

[0601] In some embodiments, the first repressor domain is or comprises KAP1 or a functional variant or fragment thereof, and the second repressor domain is or comprises bacterial MQ1 or a functional variant or fragment thereof.

[0602] In some embodiments, an expression repression system comprises a first expression repressor, wherein the first expression repressor is an expression repressor chosen from dCas9-MQ1, dCas9-DNMT1, dCas9-DNMT3a/31, G9A-dCas9, dCas9-HDAC8, dCas9-LSD1, EZH2-dCas9, EZH2-dCas9-KRAB, G9a-dCas9-KRAB, and Fog1-dCas9-Fog1, and a second expression repressor, wherein the second expression repressor is an expression repressor chosen from dCas9-MQ1, dCas9-DNMT1, dCas9-DNMT3a/31, G9A-dCas9, dCas9-HDAC8, dCas9-LSD1, EZH2-dCas9, EZH2-dCas9-KRAB, G9a-dCas9-KRAB, and Fog1-dCas9-Fog1.

[0603] In some embodiments, the expression repression system is encoded by a first nucleic acid encoding the first expression repressor, wherein expression is driven by a first promoter or IRES, and a second nucleic acid encoding the second expression repressor, wherein expression is driven by a second promoter or IRES.

### Target Sites

[0604] Expression repression systems disclosed herein are useful for modulating, e.g., decreasing, expression of a target gene in cell, e.g., in a subject or patient. A target gene may be any gene known to those of skill in the art. In some embodiments, a target gene is associated with a disease or condition in a subject, e.g., a mammal, e.g., a human, bovine, horse, sheep, chicken, rat, mouse, cat, or dog. A target gene may include coding sequences, e.g., exons, and/or non-coding sequences, e.g., introns, 3′UTR, or 5′UTR. In some embodiments, a target gene is operably linked to a transcription control element.

[0605] A DNA-targeting moiety suitable for use in an expression repressor of an expression repression system described herein may bind, e.g., specifically bind, to any site within a target gene, transcription control element operably linked to a target gene, or anchor sequence (e.g., an anchor sequence proximal to a target gene or associated with an anchor sequence-mediated conjunction operably linked to a target gene (e.g., an anchor sequence-mediated conjunction is operably linked to a target gene if disruption of the conjunction alters expression of the target gene)).

[0606] In some embodiments, a DNA-targeting moiety binds to a target gene. In some embodiments, a DNA-targeting moiety binds to a site within an exon of a target gene. In some embodiments, a DNA-targeting moiety binds to a site within an intron of a target gene. In some embodiments, a DNA-targeting moiety binds to a site at the boundary of an exon and an intron, e.g., a splice site, of a target gene. In some embodiments, a DNA-targeting moiety binds to a site within the 5′UTR of a target gene. In some embodiments, a DNA-targeting moiety binds to a site within the 3′UTR of a target gene. Target genes include, but are not limited to, the gene encoding β-2-microglobulin, the gene encoding MYC, the gene encoding HSPA1B, the gene encoding GATA1, the gene encoding APOB, the gene encoding FOXP3, the gene encoding CXCL1, the gene encoding CXCL2, the gene encoding CXCL3, the gene encoding CXCL4, the gene encoding CXCL5, the gene encoding CXCL6, the gene encoding CXCL7, and the gene encoding CXCL8.

[0607] In some embodiments, a DNA-targeting moiety binds to a transcription control element operably linked to a target gene, e.g., a promoter or enhancer. In some embodiments, a DNA-targeting moiety binds to a portion of or a site within a promoter operably linked to a target gene. In some embodiments, a DNA-targeting moiety binds to the transcription start site of a target gene. In some embodiments, a DNA-targeting moiety binds to a portion of or a site within an enhancer operably linked to a target gene. A promoter is, typically, a sequence element that initiates transcription of an associated gene. Promoters are typically near the 5′ end of a gene, not far from its transcription start site. As those of ordinary skill are aware, transcription of protein-coding genes in eukaryotic cells is typically initiated by binding of general transcription factors (e.g., TFIID, TFIIE, TFIIH, etc.) and Mediator to core promoter sequences as a preinitiation complex that directs RNA polymerase II to the transcription start site, and in many instances remains bound to the core promoter sequences even after RNA polymerase escapes and elongation of the primary transcript is initiated. In some embodiments, a promoter includes a sequence element such as TATA, Inr, DPE, or BRE, but those skilled in the art are well aware that such sequences are not necessarily required to define a promoter. Those skilled in the art are familiar with a variety of positive (e.g., enhancers) or negative (e.g., repressors or silencers) transcription control elements that are associated with genes. In some embodiments, a transcription control element is a transcription factor binding site. Typically, when a cognate regulatory protein is bound to such a transcription control element, transcription from the associated gene(s) is altered (e.g., increased or decreased).

[0608] In some embodiments, a DNA-targeting moiety binds to an anchor sequence, e.g., an anchor sequence proximal to a target gene or associated with an anchor sequence-mediated conjunction operably linked to a target gene (e.g., an anchor sequence-mediated conjunction is operably linked to a target gene if disruption of the conjunction alters expression of the target gene). In some embodiments, a DNA-targeting moiety binds to or proximal to an anchor sequence of an anchor sequence mediated conjunction (ASMC) comprising a target plurality of genes, e.g., human CXCL1-8. In general, an anchor sequence is a genomic sequence element to which a genomic complex component binds specifically. In some embodiments, binding of a genomic complex component to an anchor sequence nucleates complex formation, e.g., anchor sequence-mediated conjunction formation. Each anchor sequence-mediated conjunction comprises one or more anchor sequences, e.g., a plurality. In some embodiments, an anchor sequence-mediated conjunction can be disrupted to alter, e.g., inhibit, expression of a target gene. Such disruptions may modulate gene expression by, e.g., changing topological structure of DNA, e.g., by modulating the ability of a target gene to interact with a transcription control element (e.g., enhancing and silencing/repressive sequences).

[0609] A DNA-targeting moiety suitable for use in an expression repressor of an expression repression system described herein may bind, e.g., specifically bind, to a site that is proximal to a target gene (e.g., an exon, intron, or splice site within the target gene), proximal to a transcription control element operably linked to the target gene, or proximal to an anchor sequence, e.g., an anchor sequence proximal to a target gene or associated with an anchor sequence-mediated conjunction operably linked to a target gene (e.g., an anchor sequence-mediated conjunction is operably linked to a target gene if disruption of the conjunction alters expression of the target gene). As used herein, proximal refers to a closeness of two sites, e.g., nucleic acid sites, such that binding of an expression repressor at the first site and/or modification of the first site by an expression repressor will produce the same or substantially the same effect as binding and/or modification of the other site. For example, a DNA-targeting moiety may bind to a first site that is proximal to an enhancer (the second site), and the repressor domain associated with said DNA-targeting moiety may epigenetically modify the first site such that the enhancer's effect on expression of a target gene is modified, substantially the same as if the second site (the enhancer sequence) had been bound and/or modified. In some embodiments, a site proximal to a target gene (e.g., an exon, intron, or splice site within the target gene), proximal to a transcription control element operably linked to the target gene, or proximal to an anchor sequence is less than 5000, 4000, 3000, 2000, 1000, 900, 800, 700, 600, 500, 400, 300, 200, 100, 50, or 25 base pairs from the target gene (e.g., an exon, intron, or splice site within the target gene), transcription control element, or anchor sequence (and optionally at least 20, 25, 50, 100, 200, or 300 base pairs from the target gene (e.g., an exon, intron, or splice site within the target gene), transcription control element, or anchor sequence).

[0610] A DNA-targeting moiety suitable for use in an expression repressor of an expression repression system described herein may bind, e.g., specifically bind, to a site comprising at least 10, 11, 12, 13, 14, 15, 16, 17, 18, 19, 20, 21, 22, 23, 24, 25, 26, 27, 28, 29, 30, 31, 32, 33, 34, 35, 36, 37, 38, 39, 40, 41, 42, 43, 44, 45, 46, 47, 48, 49, or 50 nucleotides or base pairs (and optionally no more 50, 49, 48, 47, 46, 45, 44, 43, 42, 41, 40, 39, 38, 37, 36, 35, 34, 33, 32, 31, 30, 29, 28, 27, 26, 25, 24, 23, 22, 21, 20, 19, 18, 17, 16, 15, 14, 13, 12, 11, or 10 nucleotides or base pairs). In some embodiments, a DNA-targeting moiety binds to a site comprising 10, 11, 12, 13, 14, 15, 16, 17, 18, 19, 20, 21, 22, 23, 24, 25, 26, 27, 28, 29, 30, 31, 32, 33, 34, 35, 36, 37, 38, 39, 40, 41, 42, 43, 44, 45, 46, 47, 48, 49, or 50 nucleotides or base pairs.

[0611] Expression repression systems of the present disclosure may comprise two or more expression repressors. In some embodiments, the expression repressors of an expression repression system each comprise a different DNA-targeting moiety.

[0612] In some embodiments, an expression repression system comprises a first expression repressor comprising a DNA-targeting moiety that binds a target gene, e.g., an exon, intron, or exon intron boundary (e.g., splice site), and second expression repressor comprising a DNA-targeting moiety that binds the target gene, e.g., an exon, intron, or exon intron boundary (e.g., splice site). In some embodiments, an expression repression system comprises a first expression repressor comprising a DNA-targeting moiety that binds a target gene, e.g., an exon, intron, or exon intron boundary (e.g., splice site), and second expression repressor comprising a DNA-targeting moiety that binds to a transcription control element (e.g., promoter or enhancer) operably linked to the target gene. In some embodiments, an expression repression system comprises a first expression repressor comprising a DNA-targeting moiety that binds to a transcription control element (e.g., promoter or enhancer) operably linked to a target gene, and a second expression repressor comprising a DNA-targeting moiety that binds to a transcription control element (e.g., promoter or enhancer) operably linked to the target gene. In some embodiments, an expression repression system comprises a first expression repressor comprising a DNA-targeting moiety that binds to an anchor sequence proximal to a target gene or associated with an anchor sequence-mediated conjunction operably linked to a target gene, and a second expression repressor comprising a DNA-targeting moiety that binds to a transcription control element (e.g., promoter or enhancer) operably linked to the target gene. In some embodiments, an expression repression system comprises a first expression repressor comprising a DNA-targeting moiety that binds to an anchor sequence proximal to a target gene or associated with an anchor sequence-mediated conjunction operably linked to a target gene, and a second expression repressor comprising a DNA-targeting moiety that binds to the target gene, e.g., an exon, intron, or exon intron boundary (e.g., splice site). In some embodiments, an expression repression system comprises a first expression repressor comprising a DNA-targeting moiety that binds to an anchor sequence proximal to a target gene or associated with an anchor sequence-mediated conjunction operably linked to a target gene, and a second expression repressor comprising a DNA-targeting moiety that binds to an anchor sequence proximal to the target gene or associated with an anchor sequence-mediated conjunction operably linked to the target gene.

[0613] In some embodiments, an expression repression system comprises a first expression repressor comprising a DNA-targeting moiety that binds to a first site, e.g., in a promoter operably linked to a target gene, and a second expression repressor comprising a DNA-targeting moiety that binds to a second site, e.g., in the promoter operably linked to a target gene. The first site and second site may be different and non-overlapping sites, e.g., the first site and second site do not share any sequence in common. The first site and second site may be different but overlapping sites, e.g., the first site and second site comprise different sequences but share some sequence in common.

[0614] In some embodiments, a DNA-targeting moiety binds to a sequence selected from SEQ ID NOs: 1-21 or a sequence with no more than 10, 9, 8, 7, 6, 5, 4, 3, 2, or 1 alteration relative thereto.

(SEQ ID NO: 6)
ACGGCGGGCCACCAAGGAGA
(SEQ ID NO: 7)
CAGCGCCGCGCCTTTGGGAC
(SEQ ID NO: 8)
CCCTTTCGGCGGGGAGCAGGG
(SEQ ID NO: 9)
GCTGCGCTGGGGGAGCCAGAG
(SEQ ID NO: 10)
AGCGCCCCTCCACGCGTTCAC

[0615] In some embodiments, the first DNA-targeting moiety binds to a sequence comprising any one of SEQ ID NOS: 1-21 and the second DNA-targeting moiety binds to a sequence comprising any one of SEQ ID NOS: 1-21, wherein the first and the second DNA-targeting moiety binds to the same sequence. In some embodiments, the first DNA-targeting moiety binds to a sequence comprising any one of SEQ ID NOS: 1-21 and the second DNA-targeting moiety binds to a sequence comprising any one of SEQ ID NOS: 1-21 wherein the first and the second targeting moiety binds to different sequences.

[0616] In some embodiments, an expression repressor binds a genomic locus having a sequence set forth herein, e.g., any one of SEQ ID NOS: 1-21. It is understood that, in many cases, the genomic locus being bound comprises double stranded DNA, and this locus can be described by giving the sequence of its sense strand or its antisense strand. Thus, a gRNA having a given spacer sequence may cause expression repressor to bind to a particular genomic locus, wherein one strand of the genomic locus has a sequence similar or identical to the spacer sequence, and the other strand of the genomic locus has the complementary sequence. Typically, gRNA binding to the genomic locus will involve some unwinding of the genomic locus and pairing of the gRNA spacer with the strand to which the spacer is complementary.

[0617] In some embodiments, an anchor sequence comprises a nucleating polypeptide binding motif, e.g., a CTCF-binding motif:

N(T/C/G)N(G/A/T)CC(A/T/G)(C/G)(C/T/A)AG(G/A)(G/T)GG(C/A/T)(G/A)(C/G)(C/T/A)(G/A/C) (SEQ ID NO: 81), where N is any nucleotide.

[0618] A CTCF-binding motif may also be in an opposite orientation, e.g., (G/A/C)(C/T/A)(C/G)(G/A)(C/A/T)GG(G/T)(G/A)GA(C/T/A)(C/G)(A/T/G)CC(G/A/T)N(T/C/G)N (SEQ ID NO: 82). where N is any nucleotide

[0619] In some embodiments, an anchor sequence comprises SEQ ID NO: 81 or SEQ ID NO: 82 or a sequence at least 75%, at least 80%, at least 90%, at least 95%, at least 96%, at least 97%, at least 98%, at least 99% identical to either SEQ ID NO: 81 or SEQ ID NO: 82.

[0620] In some embodiments, an anchor sequence comprises a nucleating polypeptide binding motif, e.g., a YY1-binding motif: CCGCCATNTT (SEQ ID NO: 83), where N is any nucleotide.

[0621] A YY1-binding motif may also be in an opposite orientation, e.g., AANATGGCGG (SEQ ID NO: 84), where N is any nucleotide.

[0622] A targeting moiety suitable for use in an expression repressor of an expression repression system described herein may bind, e.g., specifically bind, to a site comprising at least 10, 11, 12, 13, 14, 15, 16, 17, 18, 19, 20, 21, 22, 23, 24, 25, 26, 27, 28, 29, 30, 31, 32, 33, 34, 35, 36, 37, 38, 39, 40, 41, 42, 43, 44, 45, 46, 47, 48, 49, or 50 nucleotides or base pairs (and optionally no more 50, 49, 48, 47, 46, 45, 44, 43, 42, 41, 40, 39, 38, 37, 36, 35, 34, 33, 32, 31, 30, 29, 28, 27, 26, 25, 24, 23, 22, 21, 20, 19, 18, 17, 16, 15, 14, 13, 12, 11, or 10 nucleotides or base pairs). In some embodiments, a DNA-targeting moiety binds to a site comprising 10, 11, 12, 13, 14, 15, 16, 17, 18, 19, 20, 21, 22, 23, 24, 25, 26, 27, 28, 29, 30, 31, 32, 33, 34, 35, 36, 37, 38, 39, 40, 41, 42, 43, 44, 45, 46, 47, 48, 49, or 50 nucleotides or base pairs.

[0623] Expression repression systems of the present disclosure may comprise two or more expression repressors. In some embodiments, the expression repressors of an expression repression system each comprise a different targeting moiety.

[0624] In some embodiments, an expression repression system comprises a first expression repressor comprising a DNA-targeting moiety that binds a target gene, e.g., an exon, intron, or exon intron boundary (e.g., splice site), and second expression repressor comprising a DNA-targeting moiety that binds the target gene, e.g., an exon, intron, or exon intron boundary (e.g., splice site). In some embodiments, an expression repression system comprises a first expression repressor comprising a DNA-targeting moiety that binds a target gene, e.g., an exon, intron, or exon intron boundary (e.g., splice site), and second expression repressor comprising a DNA-targeting moiety that binds to a transcription control element (e.g., promoter or enhancer) operably linked to the target gene. In some embodiments, an expression repression system comprises a first expression repressor comprising a DNA-targeting moiety that binds to a transcription control element (e.g., promoter or enhancer) operably linked to a target gene, and a second expression repressor comprising a DNA-targeting moiety that binds to a transcription control element (e.g., promoter or enhancer) operably linked to the target gene. In some embodiments, an expression repression system comprises a first expression repressor comprising a DNA-targeting moiety that binds to an anchor sequence proximal to a target gene, e or associated with an anchor sequence-mediated conjunction operably linked to a target gene, and a second expression repressor comprising a DNA-targeting moiety that binds to a transcription control element (e.g., promoter or enhancer) operably linked to the target gene. In some embodiments, an expression repression system comprises a first expression repressor comprising a DNA-targeting moiety that binds to an anchor sequence proximal to a target gene, or associated with an anchor sequence-mediated conjunction operably linked to a target gene, and a second expression repressor comprising a DNA-targeting moiety that binds to the target gene, e.g., an exon, intron, or exon intron boundary (e.g., splice site). In some embodiments, an expression repression system comprises a first expression repressor comprising a DNA-targeting moiety that binds to an anchor sequence proximal to a target gene, or associated with an anchor sequence-mediated conjunction operably linked to a target gene, and a second expression repressor comprising a DNA-targeting moiety that binds to an anchor sequence proximal to the target gene, or associated with an anchor sequence-mediated conjunction operably linked to the target gene.

### Other Compositions

[0625] Nucleic Acids and Vectors

[0626] The present disclosure is further directed, in part, to nucleic acids encoding expression repressors or expression repression systems described herein. In some embodiments, an expression repression system may be provided via a composition comprising a nucleic acid encoding the expression repression system, e.g., expression repressor(s) of the expression repression system, wherein the nucleic acid is associated with sufficient other sequences to achieve expression of the expression repression system, e.g., expression repressor(s) of the expression repression system, in a system of interest (e.g., in a particular cell, tissue, organism, etc.).

[0627] In some particular embodiments, the present disclosure provides compositions of nucleic acids that encode an expression repression system, one or more expression repressors, or polypeptide portion thereof. In some such embodiments, provided nucleic acids may be or include DNA, RNA, or any other nucleic acid moiety or entity as described herein, and may be prepared by any technology described herein or otherwise available in the art (e.g., synthesis, cloning, amplification, in vitro or in vivo transcription, etc.). In some embodiments, provided nucleic acids that encode an expression repression system, one or more expression repressors, or polypeptide portion thereof may be operationally associated with one or more replication, integration, and/or expression signals appropriate and/or sufficient to achieve integration, replication, and/or expression of the provided nucleic acid in a system of interest (e.g., in a particular cell, tissue, organism, etc.). In some embodiments, a composition for delivering an expression repression system described herein is or comprises a vector, e.g., a viral vector, comprising one or more nucleic acids encoding one or more components of an expression repression system, e.g., expression repressor(s) of the expression repression system as described herein.

[0628] In some embodiments, a composition for delivering an expression repressor or an expression repression system described herein is or comprises RNA, e.g., mRNA, comprising one or more nucleic acids encoding one or more components of an expression repressor or an expression repression system, e.g., expression repressor(s) of the expression repression system as described herein.

[0629] Nucleic acids as described herein or nucleic acids encoding a protein described herein, may be incorporated into a vector. Vectors, including those derived from retroviruses such as lentivirus, are suitable tools to achieve long-term gene transfer since they allow long-term, stable integration of a transgene and its propagation in daughter cells. Examples of vectors include expression vectors, replication vectors, probe generation vectors, and sequencing vectors. An expression vector may be provided to a cell in the form of a viral vector. Viral vector technology is well known in the art and described in a variety of virology and molecular biology manuals. Viruses, which are useful as vectors include, but are not limited to, retroviruses, adenoviruses, adeno-associated viruses, herpes viruses, and lentiviruses. In general, a suitable vector contains an origin of replication functional in at least one organism, a promoter sequence, convenient restriction endonuclease sites, and one or more selectable markers.

[0630] Expression of natural or synthetic nucleic acids is typically achieved by operably linking a nucleic acid encoding the gene of interest to a promoter and incorporating the construct into an expression vector. Vectors can be suitable for replication and integration in eukaryotes. Typical cloning vectors contain transcription and translation terminators, initiation sequences, and promoters useful for expression of the desired nucleic acid sequence.

[0631] Additional promoter elements, e.g., enhancing sequences, may regulate frequency of transcriptional initiation. Typically, these sequences are located in a region 30-110 bp upstream of a transcription start site, although a number of promoters have recently been shown to contain functional elements downstream of transcription start sites as well. Spacing between promoter elements frequently is flexible, so that promoter function is preserved when elements are inverted or moved relative to one another. In a thymidine kinase (tk) promoter, spacing between promoter elements can be increased to 50 bp apart before activity begins to decline. Depending on the promoter, it appears that individual elements can function either cooperatively or independently to activate transcription.

[0632] One example of a suitable promoter is the immediate early cytomegalovirus (CMV) promoter sequence. This promoter sequence is a strong constitutive promoter sequence capable of driving high levels of expression of any polynucleotide sequence operatively linked thereto. In some embodiments of a suitable promoter is Elongation Growth Factor-1α (EF-1α). However, other constitutive promoter sequences may also be used, including, but not limited to the simian virus 40 (SV40) early promoter, mouse mammary tumor virus (MMTV), human immunodeficiency virus (HIV) long terminal repeat (LTR) promoter, MoMuLV promoter, an avian leukemia virus promoter, an Epstein-Barr virus immediate early promoter, a Rous sarcoma virus promoter, as well as human gene promoters such as, but not limited to, an actin promoter, a myosin promoter, a hemoglobin promoter, and a creatine kinase promoter.

[0633] The present disclosure should not interpreted to be limited to use of any particular promoter or category of promoters (e.g. constitutive promoters). For example, in some embodiments, inducible promoters are contemplated as part of the present disclosure. In some embodiments, use of an inducible promoter provides a molecular switch capable of turning on expression of a polynucleotide sequence to which it is operatively linked, when such expression is desired. In some embodiments, use of an inducible promoter provides a molecular switch capable of turning off expression when expression is not desired. Examples of inducible promoters include, but are not limited to a metallothionine promoter, a glucocorticoid promoter, a progesterone promoter, and a tetracycline promoter.

[0634] In some embodiments, an expression vector to be introduced can also contain either a selectable marker gene or a reporter gene or both to facilitate identification and selection of expressing cells from the population of cells sought to be transfected or infected through viral vectors. In some aspects, a selectable marker may be carried on a separate piece of DNA and used in a co-transfection procedure. Both selectable markers and reporter genes may be flanked with appropriate transcriptional control sequences to enable expression in the host cells. Useful selectable markers may include, for example, antibiotic-resistance genes, such as neo, etc.

[0635] In some embodiments, reporter genes may be used for identifying potentially transfected cells and/or for evaluating the functionality of transcriptional control sequences. In general, a reporter gene is a gene that is not present in or expressed by a recipient source (of a reporter gene) and that encodes a polypeptide whose expression is manifested by some easily detectable property, e.g., enzymatic activity or visualizable fluorescence. Expression of a reporter gene is assayed at a suitable time after the DNA has been introduced into the recipient cells. Suitable reporter genes may include genes encoding luciferase, beta-galactosidase, chloramphenicol acetyl transferase, secreted alkaline phosphatase, or the green fluorescent protein gene (e.g., Ui-Tei et al., 2000 FEBS Letters 479: 79-82). Suitable expression systems are well known and may be prepared using known techniques or obtained commercially. In general, a construct with a minimal 5′ flanking region that shows highest level of expression of reporter gene is identified as a promoter. Such promoter regions may be linked to a reporter gene and used to evaluate agents for ability to modulate promoter-driven transcription.

[0636] Cells

[0637] The present disclosure is further directed, in part, to cells comprising an expression repressor or an expression repression system described herein. Any cell, e.g., cell line, e.g., a cell line suitable for expression of a recombinant polypeptide, known to one of skill in the art is suitable to comprise an expression repressor or an expression repression system described herein. In some embodiments, a cell, e.g., cell line, may be used to express an expression repressor or an expression repression system, e.g., expression repressor(s), described herein. In some embodiments, a cell, e.g., cell line, may be used to express or amplify a nucleic acid, e.g., a vector, encoding an expression repressor or an expression repression system, e.g., expression repressor(s), described herein. In some embodiments, a cell comprises a nucleic acid encoding an expression repressor or an expression repression system, e.g., expression repressor(s), described herein.

[0638] In some embodiments, a cell comprises a first nucleic acid encoding a first component of an expression repressor or an expression repression system, e.g., a first expression repressor, and a second nucleic acid encoding a second component of the expression repression system, e.g., a second expression repressor. In some embodiments, wherein a cell comprises nucleic acid encoding an expression repression system comprising two or more expression repressors, the sequences encoding each expression repressor are disposed on separate nucleic acid molecules, e.g., on different vectors, e.g., a first vector encoding a first expression repressor and a second vector encoding a second expression repressor. In some embodiments, the sequences encoding each expression repressor are disposed on the same nucleic acid molecule, e.g., on the same vector. In some embodiments, some or all of the nucleic acid encoding the expression repression system is integrated into the genomic DNA of the cell. In some embodiments, the nucleic acid encoding a first expression repressor of an expression repression system is integrated into the genomic DNA of a cell, and the nucleic acid encoding a second expression repressor of an expression repression system is not integrated into the genomic DNA of a cell (e.g., is situated on a vector). In some embodiments, the nucleic acid(s) encoding a first and a second expression repressor of an expression repression system are integrated into the genomic DNA of a cell, e.g., at the same (e.g., adjacent or colocalized) or different sites in the genomic DNA.

[0639] Examples of cells that may comprise and/or express an expression repression system or expression repressor described herein include, but are not limited to, hepatocytes, neuronal cells, endothelial cells, myocytes, and lymphocytes.

[0640] The present disclosure is further directed, in part, to a cell made by a method or process described herein. In some embodiments, the disclosure provides a cell produced by: providing an expression repression system described herein, providing the cell, and contacting the cell with the expression repression system (or a nucleic acid encoding the expression repression system, or a composition comprising said expression repression system or nucleic acid). Without wishing to be bound by theory, a cell contacted with an expression repression system described herein may exhibit: a decrease in expression of a target gene and/or a modification of epigenetic markers associated with the target gene, a transcription control element operably linked to the target gene, or an anchor sequence proximal to the target gene or associated with an anchor sequence-mediated conjunction operably linked to the target gene compared to a similar cell that has not been contacted by the expression repression system. In some embodiments, a cell exhibiting said decrease in expression of a target gene and/or modification of epigenetic markers does not comprise the expression repression system. The decrease in expression and/or modification of epigenetic markers may persist, e.g., for at least 1, 2, 3, 4, 5, 6, 7, 8, 9, 10, 11, 12, 13, 14, 15, 16, 17, 18, 19, 20, 21, 22, 23, or 24 hours, or at least 1, 2, 3, 4, 5, 6, 7, 10, or 14 days, or at least 1, 2, 3, 4, or 5 weeks, or at least 1, 2, 3, 4, 5, 6, 7, 8, 9, 10, 11, or 12 months, or at least 1, 2, 3, 4, or 5 years (e.g., indefinitely) after contact with the expression repression system. In some embodiments, a cell previously contacted by an expression repression system retains the decrease in expression and/or modification of epigenetic markers after the expression repression system is no longer present in the cell, e.g., for at least 1, 2, 3, 4, 5, 6, 7, 8, 9, 10, 11, 12, 13, 14, 15, 16, 17, 18, 19, 20, 21, 22, 23, or 24 hours, or at least 1, 2, 3, 4, 5, 6, 7, 10, or 14 days, or at least 1, 2, 3, 4, or 5 weeks, or at least 1, 2, 3, 4, 5, 6, 7, 8, 9, 10, 11, or 12 months, or at least 1, 2, 3, 4, or 5 years (e.g., indefinitely) after the expression repression system is no longer present in the cell.

Methods of Making Expression Repression Systems and/or Expression Repressors

[0641] In some embodiments, an expression repressor comprises or is a protein and may thus be produced by methods of making proteins. In some embodiments, an expression repression system, e.g., the expression repressor(s) of an expression repression system, comprise one or more proteins and may thus be produced by methods of making proteins. As will be appreciated by one of skill, methods of making proteins or polypeptides (which may be included in modulating agents as described herein) are routine in the art. See, in general, Smales & James (Eds.), Therapeutic Proteins: Methods and Protocols (Methods in Molecular Biology), Humana Press (2005); and Crommelin, Sindelar & Meibohm (Eds.), Pharmaceutical Biotechnology: Fundamentals and Applications, Springer (2013).

[0642] A protein or polypeptide of compositions of the present disclosure can be biochemically synthesized by employing standard solid phase techniques. Such methods include exclusive solid phase synthesis, partial solid phase synthesis methods, fragment condensation, classical solution synthesis. These methods can be used when a peptide is relatively short (e.g., 10 kDa) and/or when it cannot be produced by recombinant techniques (i.e., not encoded by a nucleic acid sequence) and therefore involves different chemistry.

[0643] Solid phase synthesis procedures are well known in the art and further described by John Morrow Stewart and Janis Dillaha Young, Solid Phase Peptide Syntheses, 2nd Ed., Pierce Chemical Company, 1984; and Coin, I., et al., Nature Protocols, 2:3247-3256, 2007.

[0644] For longer peptides, recombinant methods may be used. Methods of making a recombinant therapeutic polypeptide are routine in the art. See, in general, Smales & James (Eds.), Therapeutic Proteins: Methods and Protocols (Methods in Molecular Biology), Humana Press (2005); and Crommelin, Sindelar & Meibohm (Eds.), Pharmaceutical Biotechnology: Fundamentals and Applications, Springer (2013).

[0645] Exemplary methods for producing a therapeutic pharmaceutical protein or polypeptide involve expression in mammalian cells, although recombinant proteins can also be produced using insect cells, yeast, bacteria, or other cells under control of appropriate promoters. Mammalian expression vectors may comprise non transcribed elements such as an origin of replication, a suitable promoter, and other 5′ or 3′ flanking non transcribed sequences, and 5′ or 3′ non-translated sequences such as necessary ribosome binding sites, a polyadenylation site, splice donor and acceptor sites, and termination sequences. DNA sequences derived from the SV40 viral genome, for example, SV40 origin, early promoter, splice, and polyadenylation sites may be used to provide other genetic elements required for expression of a heterologous DNA sequence. Appropriate cloning and expression vectors for use with bacterial, fungal, yeast, and mammalian cellular hosts are described in Green & Sambrook, Molecular Cloning: A Laboratory Manual (Fourth Edition), Cold Spring Harbor Laboratory Press (2012).

[0646] In cases where large amounts of the protein or polypeptide are desired, it can be generated using techniques such as described by Brian Bray, Nature Reviews Drug Discovery, 2:587-593, 2003; and Weissbach & Weissbach, 1988, Methods for Plant Molecular Biology, Academic Press, NY, Section VIII, pp 421-463.

[0647] Various mammalian cell culture systems can be employed to express and manufacture recombinant protein. Examples of mammalian expression systems include CHO cells, COS cells, HeLA and BHK cell lines. Processes of host cell culture for production of protein therapeutics are described in Zhou and Kantardjieff (Eds.), Mammalian Cell Cultures for Biologics Manufacturing (Advances in Biochemical Engineering/Biotechnology), Springer (2014). Compositions described herein may include a vector, such as a viral vector, e.g., a lentiviral vector, encoding a recombinant protein. In some embodiments, a vector, e.g., a viral vector, may comprise a nucleic acid encoding a recombinant protein. Compositions described herein may include a lipid nanoparticle encapsulating a vector, such as a viral vector, e.g., a lentiviral vector, encoding a recombinant protein. In some embodiments, a lipid nanoparticle encapsulating a vector, e.g., a viral vector, may comprise a nucleic acid encoding a recombinant protein.

[0648] Proteins comprise one or more amino acids. Amino acids include any compound and/or substance that can be incorporated into a polypeptide chain, e.g., through formation of one or more peptide bonds. In some embodiments, an amino acid has the general structure H₂N—C(H)(R)—COOH. In some embodiments, an amino acid is a naturally occurring amino acid. In some embodiments, an amino acid is a non-natural amino acid; in some embodiments, an amino acid is a D-amino acid; in some embodiments, an amino acid is an L-amino acid. “Standard amino acid” refers to any of the twenty standard L-amino acids commonly found in naturally occurring peptides. “Nonstandard amino acid” refers to any amino acid, other than the standard amino acids, regardless of whether it is prepared synthetically or obtained from a natural source. In some embodiments, an amino acid, including a carboxy- and/or amino-terminal amino acid in a polypeptide, can contain a structural modification as compared with the general structure above. For example, in some embodiments, an amino acid may be modified by methylation, amidation, acetylation, pegylation, glycosylation, phosphorylation, and/or substitution (e.g., of the amino group, the carboxylic acid group, one or more protons, and/or the hydroxyl group) as compared with the general structure. In some embodiments, such modification may, for example, alter the circulating half-life of a polypeptide containing the modified amino acid as compared with one containing an otherwise identical unmodified amino acid. In some embodiments, such modification does not significantly alter a relevant activity of a polypeptide containing the modified amino acid, as compared with one containing an otherwise identical unmodified amino acid. As will be clear from context, in some embodiments, the term “amino acid” may be used to refer to a free amino acid; in some embodiments it may be used to refer to an amino acid residue of a polypeptide.

[0649] Purification of protein therapeutics is described in Franks, Protein Biotechnology: Isolation, Characterization, and Stabilization, Humana Press (2013); and in Cutler, Protein Purification Protocols (Methods in Molecular Biology), Humana Press (2010). Formulation of protein therapeutics is described in Meyer (Ed.), Therapeutic Protein Drug Products: Practical Approaches to formulation in the Laboratory, Manufacturing, and the Clinic, Woodhead Publishing Series (2012).

### Pharmaceutical Compositions, Formulation, Delivery, and Administration

[0650] The present disclosure is further directed, in part, to pharmaceutical compositions comprising an expression repressor or an expression repression system, e.g., expression repressor(s), described herein, to pharmaceutical compositions comprising nucleic acids encoding the expression repressor or the expression repression system, e.g., expression repressor(s), described herein, and/or to and/or compositions that deliver an expression repressor or an expression repression system, e.g., expression repressor(s), described herein to a cell, tissue, organ, and/or subject.

[0651] As used herein, the term “pharmaceutical composition” refers to an active agent (e.g., an expression repressor or nucleic acids of the expression receptor, e.g., an expression repression system, e.g., expression repressor(s) of an expression repression system, or nucleic acid encoding the same), formulated together with one or more pharmaceutically acceptable carriers (e.g., pharmaceutically acceptable carriers known to those of skill in the art). In some embodiments, active agent is present in unit dose amount appropriate for administration in a therapeutic regimen that shows a statistically significant probability of achieving a predetermined therapeutic effect when administered to a relevant population. In some embodiments, a pharmaceutical composition comprising an expression repressor of the present disclosure comprises an expression repressor or nucleic acid(s) encoding the same. In some embodiments, a pharmaceutical composition comprising an expression repression system of the present disclosure comprises or each of the expression repressors of the expression repression system or nucleic acid(s) encoding the same (e.g., if an expression repression system comprises a first expression repressor and a second expression repressor, the pharmaceutical composition comprises the first and second expression repressor). In some embodiments, a pharmaceutical composition comprises less than all of the expression repressors of an expression repression system comprising a plurality of expression repressors. For example, an expression repression system may comprise a first expression repressor and a second expression repressor, and a first pharmaceutical composition may comprise the first expression repressor or nucleic acid encoding the same and a second pharmaceutical composition may comprise the second expression repressor or nucleic acid encoding the same.

[0652] In some embodiments, pharmaceutical compositions may be specially formulated for administration in solid or liquid form, including those adapted for the following: oral administration, for example, drenches (aqueous or non-aqueous solutions or suspensions), tablets, e.g., those targeted for buccal, sublingual, and systemic absorption, boluses, powders, granules, pastes for application to the tongue; parenteral administration, for example, by subcutaneous, intramuscular, intravenous or epidural injection as, for example, a sterile solution or suspension, or sustained-release formulation; topical application, for example, as a cream, ointment, or a controlled-release patch or spray applied to the skin, lungs, or oral cavity; intravaginally or intrarectally, for example, as a pessary, cream, or foam; sublingually; ocularly; transdermally; or nasally, pulmonary, and/or to other mucosal surfaces.

[0653] As used herein, the term “pharmaceutically acceptable” refers to those compounds, materials, compositions, and/or dosage forms which are, within the scope of sound medical judgment, suitable for use in contact with the tissues of human beings and animals without excessive toxicity, irritation, allergic response, or other problem or complication, commensurate with a reasonable benefit/risk ratio.

[0654] As used herein, the term “pharmaceutically acceptable carrier” means a pharmaceutically acceptable material, composition, or vehicle, such as a liquid or solid filler, diluent, excipient, or solvent encapsulating material, involved in carrying or transporting the subject compound from one organ, or portion of the body, to another organ, or portion of the body. Each carrier must be “acceptable” in the sense of being compatible with the other ingredients of the formulation and not injurious to the patient.

[0655] In some embodiments, for example, materials which can serve as pharmaceutically-acceptable carriers include: sugars, such as lactose, glucose and sucrose; starches, such as corn starch and potato starch; cellulose, and its derivatives, such as sodium carboxymethyl cellulose, ethyl cellulose and cellulose acetate; powdered tragacanth; malt; gelatin; talc; excipients, such as cocoa butter and suppository waxes; oils, such as peanut oil, cottonseed oil, safflower oil, sesame oil, olive oil, corn oil and soybean oil; glycols, such as propylene glycol; polyols, such as glycerin, sorbitol, mannitol and polyethylene glycol; esters, such as ethyl oleate and ethyl laurate; agar; buffering agents, such as magnesium hydroxide and aluminum hydroxide; alginic acid; pyrogen-free water; isotonic saline; Ringer's solution; ethyl alcohol; pH buffered solutions; polyesters, polycarbonates and/or polyanhydrides; and other non-toxic compatible substances employed in pharmaceutical formulations.

[0656] As used herein, the term “pharmaceutically acceptable salt”, refers to salts of such compounds that are appropriate for use in pharmaceutical contexts, i.e., salts which are, within the scope of sound medical judgment, suitable for use in contact with the tissues of humans and lower animals without undue toxicity, irritation, allergic response, and the like, and are commensurate with a reasonable benefit/risk ratio. Pharmaceutically acceptable salts are well known in the art. For example, S. M. Berge, et al. describes pharmaceutically acceptable salts in detail in J. Pharmaceutical Sciences, 66: 1-19 (1977). In some embodiments, pharmaceutically acceptable salts include, but are not limited to, nontoxic acid addition salts, which are salts of an amino group formed with inorganic acids such as hydrochloric acid, hydrobromic acid, phosphoric acid, sulfuric acid and perchloric acid or with organic acids such as acetic acid, maleic acid, tartaric acid, citric acid, succinic acid, or malonic acid or by using other methods used in the art such as ion exchange. In some embodiments, pharmaceutically acceptable salts include, but are not limited to, adipate, alginate, ascorbate, aspartate, benzenesulfonate, benzoate, bisulfate, borate, butyrate, camphorate, camphorsulfonate, citrate, cyclopentanepropionate, digluconate, dodecylsulfate, ethanesulfonate, formate, fumarate, glucoheptonate, glycerophosphate, gluconate, hemisulfate, heptanoate, hexanoate, hydroiodide, 2-hydroxy-ethanesulfonate, lactobionate, lactate, laurate, lauryl sulfate, malate, maleate, malonate, methanesulfonate, 2-naphthalenesulfonate, nicotinate, nitrate, oleate, oxalate, palmitate, pamoate, pectinate, persulfate, 3-phenylpropionate, phosphate, picrate, pivalate, propionate, stearate, succinate, sulfate, tartrate, thiocyanate, p-toluenesulfonate, undecanoate, valerate salts, and the like. Representative alkali or alkaline earth metal salts include sodium, lithium, potassium, calcium, magnesium, and the like. In some embodiments, pharmaceutically acceptable salts include, when appropriate, nontoxic ammonium, quaternary ammonium, and amine cations formed using counterions such as halide, hydroxide, carboxylate, sulfate, phosphate, nitrate, alkyl having from 1 to 6 carbon atoms, sulfonate, and aryl sulfonate.

[0657] In various embodiments, the present disclosure provides pharmaceutical compositions described herein with a pharmaceutically acceptable excipient. Pharmaceutically acceptable excipient includes an excipient that is useful in preparing a pharmaceutical composition that is generally safe, non-toxic, and desirable, and includes excipients that are acceptable for veterinary use as well as for human pharmaceutical use. Such excipients may be solid, liquid, semisolid, or, in the case of an aerosol composition, gaseous.

[0658] Pharmaceutical preparations may be made following conventional techniques of pharmacy involving milling, mixing, granulation, and compressing, when necessary, for tablet forms; or milling, mixing, and filling for hard gelatin capsule forms. When a liquid carrier is used, a preparation can be in the form of a syrup, elixir, emulsion or an aqueous or non-aqueous solution or suspension. Such a liquid formulation may be administered directly per os.

[0659] In some embodiments, pharmaceutical compositions may be formulated for delivery to a cell and/or to a subject via any route of administration. Modes of administration to a subject may include injection, infusion, inhalation, intranasal, intraocular, topical delivery, intercannular delivery, or ingestion. Injection includes, without limitation, intravenous, intramuscular, intra-arterial, intrathecal, intraventricular, intracapsular, intraorbital, intracardiac, intradermal, intraperitoneal, transtracheal, subcutaneous, subcuticular, intraarticular, sub capsular, subarachnoid, intraspinal, intracerebrospinal, and intrasternal injection and infusion. In some embodiments, administration includes aerosol inhalation, e.g., with nebulization. In some embodiments, administration is systemic (e.g., oral, rectal, nasal, sublingual, buccal, or parenteral), enteral (e.g., system-wide effect, but delivered through the gastrointestinal tract), or local (e.g., local application on the skin, intravitreal injection). In some embodiments, one or more compositions is administered systemically. In some embodiments, administration is non-parenteral and a therapeutic is a parenteral therapeutic. In some embodiments, administration may be bronchial (e.g., by bronchial instillation), buccal, dermal (which may be or comprise, for example, one or more of topical to the dermis, intradermal, interdermal, transdermal, etc.), enteral, intra-arterial, intradermal, intragastric, intramedullary, intramuscular, intranasal, intraperitoneal, intrathecal, intravenous, intraventricular, within a specific organ (e. g. intrahepatic), mucosal, nasal, oral, rectal, subcutaneous, sublingual, topical, tracheal (e.g., by intratracheal instillation), vaginal, vitreal, etc. In some embodiments, administration may be a single dose. In some embodiments, administration may involve dosing that is intermittent (e.g., a plurality of doses separated in time) and/or periodic (e.g., individual doses separated by a common period of time) dosing. In some embodiments, administration may involve continuous dosing (e.g., perfusion) for at least a selected period of time.

[0660] Pharmaceutical compositions according to the present disclosure may be delivered in a therapeutically effective amount. A precise therapeutically effective amount is an amount of a composition that will yield the most effective results in terms of efficacy of treatment in a given subject. This amount will vary depending upon a variety of factors, including but not limited to characteristics of a therapeutic compound (including activity, pharmacokinetics, pharmacodynamics, and bioavailability), physiological condition of a subject (including age, sex, disease type and stage, general physical condition, responsiveness to a given dosage, and type of medication), nature of a pharmaceutically acceptable carrier or carriers in a formulation, and/or route of administration.

[0661] In some aspects, the present disclosure provides methods of delivering a therapeutic comprising administering a composition as described herein to a subject, wherein a genomic complex modulating agent is a therapeutic and/or wherein delivery of a therapeutic causes changes in gene expression relative to gene expression in absence of a therapeutic.

[0662] Methods as provided in various embodiments herein may be utilized in any some aspects delineated herein. In some embodiments, one or more compositions is/are targeted to specific cells, or one or more specific tissues.

[0663] For example, in some embodiments one or more compositions is/are targeted to epithelial, connective, muscular, and/or nervous tissue or cells. In some embodiments a composition is targeted to a cell or tissue of a particular organ system, e.g., cardiovascular system (heart, vasculature); digestive system (esophagus, stomach, liver, gallbladder, pancreas, intestines, colon, rectum and anus); endocrine system (hypothalamus, pituitary gland, pineal body or pineal gland, thyroid, parathyroids, adrenal glands); excretory system (kidneys, ureters, bladder); lymphatic system (lymph, lymph nodes, lymph vessels, tonsils, adenoids, thymus, spleen); integumentary system (skin, hair, nails); muscular system (e.g., skeletal muscle); nervous system (brain, spinal cord, nerves); reproductive system (ovaries, uterus, mammary glands, testes, vas deferens, seminal vesicles, prostate); respiratory system (pharynx, larynx, trachea, bronchi, lungs, diaphragm); skeletal system (bone, cartilage); and/or combinations thereof.

[0664] In some embodiments, a composition of the present disclosure crosses a blood-brain-barrier, a placental membrane, or a blood-testis barrier.

[0665] In some embodiments, a pharmaceutical composition as provided herein is administered systemically.

[0666] In some embodiments, administration is non-parenteral and a therapeutic is a parenteral therapeutic.

[0667] In some embodiments, a pharmaceutical composition of the present disclosure has improved PK/PD, e.g., increased pharmacokinetics or pharmacodynamics, such as improved targeting, absorption, or transport (e.g., at least 5%, 10%, 15%, 20%, 30%, 40%, 50%, 60%, 75%, 80%, 90% improved or more) as compared to an active agent alone. In some embodiments, a pharmaceutical composition has reduced undesirable effects, such as reduced diffusion to a nontarget location, off-target activity, or toxic metabolism, as compared to a therapeutic alone (e.g., at least 5%, 10%, 15%, 20%, 30%, 40%, 50%, 60%, 75%, 80%, 90% or more reduced, as compared to an active agent alone). In some embodiments, a composition increases efficacy and/or decreases toxicity of a therapeutic (e.g., at least 5%, 10%, 15%, 20%, 30%, 40%, 50%, 60%, 75%, 80%, 90% or more) as compared to an active agent alone. Pharmaceutical compositions described herein may be formulated for example including a carrier, such as a pharmaceutical carrier and/or a polymeric carrier, e.g., a liposome or vesicle, and delivered by known methods to a subject in need thereof (e.g., a human or non-human agricultural or domestic animal, e.g., cattle, dog, cat, horse, poultry). Such methods include transfection (e.g., lipid-mediated, cationic polymers, calcium phosphate); electroporation or other methods of membrane disruption (e.g., nucleofection) and viral delivery (e.g., lentivirus, retrovirus, adenovirus, AAV). Methods of delivery are also described, e.g., in Gori et al., Delivery and Specificity of CRISPR/Cas9 Genome Editing Technologies for Human Gene Therapy. Human Gene Therapy. July 2015, 26(7): 443-451. doi:10.1089/hum.2015.074; and Zuris et al. Cationic lipid-mediated delivery of proteins enables efficient protein-based genome editing in vitro and in vivo. Nat Biotechnol. 2014 Oct. 30; 33(1):73-80. Liposomes are spherical vesicle structures composed of a uni- or multilamellar lipid bilayer surrounding internal aqueous compartments and a relatively impermeable outer lipophilic phospholipid bilayer. Liposomes may be anionic, neutral, or cationic. Liposomes are biocompatible, nontoxic, can deliver both hydrophilic and lipophilic drug molecules, protect their cargo from degradation by plasma enzymes, and transport their load across biological membranes and the blood brain barrier (BBB) (see, e.g., Spuch and Navarro, Journal of Drug Delivery, vol. 2011, Article ID 469679, 12 pages, 2011. doi:10.1155/2011/469679 for review).

[0668] Vesicles can be made from several different types of lipids; however, phospholipids are most commonly used to generate liposomes as drug carriers. Vesicles may comprise without limitation DOTMA, DOTAP, DOTIM, DDAB, alone or together with cholesterol to yield DOTMA and cholesterol, DOTAP and cholesterol, DOTIM and cholesterol, and DDAB and cholesterol. Methods for preparation of multilamellar vesicle lipids are known in the art (see for example U.S. Pat. No. 6,693,086, the teachings of which relating to multilamellar vesicle lipid preparation are incorporated herein by reference). Although vesicle formation can be spontaneous when a lipid film is mixed with an aqueous solution, it can also be expedited by applying force in the form of shaking by using a homogenizer, sonicator, or an extrusion apparatus (see, e.g., Spuch and Navarro, Journal of Drug Delivery, vol. 2011, Article ID 469679, 12 pages, 2011. doi:10.1155/2011/469679 for review). Extruded lipids can be prepared by extruding through filters of decreasing size, as described in Templeton et al., Nature Biotech, 15:647-652, 1997, the teachings of which relating to extruded lipid preparation are incorporated herein by reference.

[0669] Methods and compositions provided herein may comprise a pharmaceutical composition administered by a regimen sufficient to alleviate a symptom of a disease, disorder, and/or condition. In some aspects, the present disclosure provides methods of delivering a therapeutic by administering compositions as described herein.

### Uses

[0670] The present disclosure is further directed to uses of the expression repression systems disclosed herein. Among other things, in some embodiments such provided technologies may be used to achieve modulation, e.g., repression, of target gene expression and, for example, enable control of target gene activity, delivery, and penetrance, e.g., in a cell. In some embodiments, a cell is a mammalian, e.g., human, cell. In some embodiments, a cell is a somatic cell. In some embodiments, a cell is a primary cell. For example, in some embodiments, a cell is a mammalian somatic cell. In some embodiments, a mammalian somatic cell is a primary cell. In some embodiments, a mammalian somatic cell is a non-embryonic cell.

### Dosage

[0671] The dosage of the administered agent or composition can vary based on, e.g., the condition being treated, the severity of the disease, the subject's individual parameters, including age, physiological condition, size and weight, duration of treatment, the type of treatment to be performed (if any), the particular route of administration and similar factors. Thus, the dose administered of the agents described herein can depend on such various parameters. The dosage of an administered composition may also vary depending upon other factors as the subject's sex, general medical condition, and severity of the disorder to be treated. It may be desirable to provide the subject with a dosage of an expression repressor or an expression repression system or combination of expression repressors disclosed herein as circumstances dictate. In some embodiments, the subject is provided with a dosage of an expression repressor, or an expression repression system or combination of expression repressors disclosed herein as circumstances dictate. Pharmaceutical compositions according to the present disclosure may be delivered in a therapeutically effective amount. A precise therapeutically effective amount is an amount of a composition that will yield the most effective results in terms of efficacy of treatment in a given subject. This amount will vary depending upon a variety of factors, including but not limited to characteristics of a therapeutic compound (including activity, pharmacokinetics, pharmacodynamics, and bioavailability), physiological condition of a subject (including age, sex, disease type and stage, general physical condition, responsiveness to a given dosage, and type of medication), nature of a pharmaceutically acceptable carrier or carriers in a formulation, and/or route of administration.

### Lipid Nanoparticles

[0672] Expression repressors or expression repression systems as described herein can be delivered using any biological delivery system/formulation including a particle, for example, a nanoparticle delivery system. Nanoparticles include particles with a dimension (e.g. diameter) between about 1 and about 1000 nanometers, between about 1 and about 500 nanometers in size, between about 1 and about 100 nm, between about 30 nm and about 200 nm, between about 50 nm and about 300 nm, between about 75 nm and about 200 nm, between about 100 nm and about 200 nm, and any range therebetween. A nanoparticle has a composite structure of nanoscale dimensions. In some embodiments, nanoparticles are typically spherical although different morphologies are possible depending on the nanoparticle composition. The portion of the nanoparticle contacting an environment external to the nanoparticle is generally identified as the surface of the nanoparticle. In some embodiments, nanoparticles have a greatest dimension ranging between 25 nm and 200 nm. Nanoparticles as described herein comprise delivery systems that may be provided in any form, including but not limited to solid, semi-solid, emulsion, or colloidal nanoparticles. A nanoparticle delivery system may include but not limited to lipid-based systems, liposomes, micelles, micro-vesicles, exosomes, or gene gun. In one embodiment, the nanoparticle is a lipid nanoparticle (LNP). In some embodiments, the LNP is a particle that comprises a plurality of lipid molecules physically associated with each other by intermolecular forces.

[0673] In some embodiments, an LNP may comprise multiple components, e.g., 3-4 components. In one embodiment, the expression repressor or a pharmaceutical composition comprising said expression repressor (or a nucleic acid encoding the same, or pharmaceutical composition comprising said expression repressor nucleic acid) is encapsulated in an LNP. In one embodiment, the expression repression system or a pharmaceutical composition comprising said expression repression system (or a nucleic acid encoding the same, or pharmaceutical composition comprising said expression repression system nucleic acid) is encapsulated in an LNP. In some embodiments, the nucleic acid encoding the first expression repressor and the nucleic acid encoding the second expression repressor are present in same LNP. In some embodiments, the nucleic acid encoding the first expression repressor and the nucleic acid encoding the second expression repressor are present in different LNPs. Preparation of LNPs and the modulating agent encapsulation may be used/and or adapted from Rosin et al, Molecular Therapy, vol. 19, no. 12, pages 1286-2200, December 2011). In some embodiments, lipid nanoparticle compositions disclosed herein are useful for expression of protein encoded by mRNA. In some embodiments, nucleic acids, when present in the lipid nanoparticles, are resistant in aqueous solution to degradation with a nuclease.

[0674] In some embodiments, the LNP formulations may include a CCD lipid, a neutral lipid, and/or a helper lipid. In some embodiments, the LNP formulation comprises an ionizable lipid. In some embodiments, an ionizable lipid may be a cationic lipid, an ionizable cationic lipid, or an amine-containing lipid that can be readily protonated. In some embodiments, the lipid is a cationic lipid that can exist in a positively charged or neutral form depending on pH. In some embodiments, the cationic lipid is a lipid capable of being positively charged, e.g., under physiological conditions. In some embodiments, the lipid particle comprises a cationic lipid in formulation with one or more of neutral lipids, ionizable amine-containing lipids, biodegradable alkyn lipids, steroids, phospholipids including polyunsaturated lipids, structural lipids (e.g., sterols), PEG, cholesterol, and polymer conjugated lipids. In some embodiments, LNP formulation (e.g., MC3 and/or SSOP) includes cholesterol, PEG, and/or a helper lipid. The LNPs may be, e.g., microspheres (including unilamellar and multilamellar vesicles, lamellar phase lipid bilayers that, in some embodiments, are substantially spherical.

[0675] In some embodiments, the LNP can comprise an aqueous core, e.g., comprising a nucleic acid encoding an expression repressor or a system as disclosed herein. In some embodiments of the present disclosure, the cargo for the LNP formulation includes at least one guide RNA. In some embodiments, the cargo, e.g., a nucleic acid encoding an expression repressor, or a system as disclosed herein, may be adsorbed to the surface of an LNP, e.g., an LNP comprising a cationic lipid. In some embodiments, the cargo, e.g., a nucleic acid encoding an expression repressor, or a system as disclosed herein may be associated with the LNP. In some embodiments, the cargo, e.g., a nucleic acid encoding an expression repressor, or a system as disclosed herein, may be encapsulated, e.g., fully encapsulated and/or partially encapsulated in an LNP.

[0676] In some embodiments, an LNP comprising a cargo may be administered for systemic delivery, e.g., delivery of a therapeutically effective dose of cargo that can result in a broad exposure of an active agent within an organism. Systemic delivery of lipid nanoparticles can be by any means known in the art including, for example, intravenous, intraarterial, subcutaneous, and intraperitoneal delivery. In some embodiments, systemic delivery of lipid nanoparticles is by intravenous delivery. In some embodiments, an LNP comprising a cargo may be administered for local delivery, e.g., delivery of an active agent directly to a target site within an organism.

[0677] The LNPs may be formulated as a dispersed phase in an emulsion, micelles, or an internal phase in a suspension. In some embodiments, the LNPs are biodegradable. In some embodiments, the LNPs do not accumulate to cytotoxic levels or cause toxicity in vivo at a therapeutically effective dose. In some embodiments, the LNPs do not accumulate to cytotoxic levels or cause toxicity in vivo after repeat administrations at a therapeutically effective dose. In some embodiments, the LNPs do not cause an innate immune response that leads to a substantially adverse effect at a therapeutically effective dose.

[0678] In some embodiments, the LNP used, comprises the formula (6Z,9Z,28Z,31Z)-heptatriacont-6,9,28,31-tetraene-19-yl 4-(dimethylamino) butanoate or ssPalmO-phenyl-P4C2 (ssPalmO-Phe, SS-OP). In some embodiments, the LNP formulation comprises the formula, (6Z,9Z,28Z,31Z)-heptatriacont-6,9,28,31-tetraene-19-yl 4-(dimethylamino)butanoate (MC3), 1,2-dioleoyl-sn-glycero-3-phosphocholine (DOPC), Cholesterol, 1,2-dimyristoyl-rac-glycero-3-methoxypolyethylene glycol-2000 (PEG2k-DMG), e.g., MC3 LNP or ssPalmO-phenyl-P4C2 (ssPalmO-Phe, SS-OP), 1,2-dioleoyl-sn-glycero-3-phosphocholine (DOPC), Cholesterol, 1,2-dimyristoyl-rac-glycero-3-methoxypolyethylene glycol-2000 (PEG2k-DMG), e.g., SSOP-LNP.

[0679] Liposomes are spherical vesicle structures composed of a uni- or multilamellar lipid bilayer surrounding internal aqueous compartments and a relatively impermeable outer lipophilic phospholipid bilayer.

[0680] Liposomes may be anionic, neutral, or cationic. Liposomes are biocompatible, nontoxic, can deliver both hydrophilic and lipophilic drug molecules, protect their cargo from degradation by plasma enzymes, and transport their load across biological membranes and the blood brain barrier (BBB) (see, e.g., Spuch and Navarro, Journal of Drug Delivery, vol. 2011, Article ID 469679, 12 pages, 2011. doi:10.1155/2011/469679 for review).

[0681] Vesicles can be made from several different types of lipids; however, phospholipids are most commonly used to generate liposomes as drug carriers. Vesicles may comprise without limitation DOTMA, DOTAP, DOTIM, DDAB, alone or together with cholesterol to yield DOTMA and cholesterol, DOTAP and cholesterol, DOTIM and cholesterol, and DDAB and cholesterol. Methods for preparation of multilamellar vesicle lipids are known in the art (see for example U.S. Pat. No. 6,693,086, the teachings of which relating to multilamellar vesicle lipid preparation are incorporated herein by reference). Although vesicle formation can be spontaneous when a lipid film is mixed with an aqueous solution, it can also be expedited by applying force in the form of shaking by using a homogenizer, sonicator, or an extrusion apparatus (see, e.g., Spuch and Navarro, Journal of Drug Delivery, vol. 2011, Article ID 469679, 12 pages, 2011. doi:10.1155/2011/469679 for review). Extruded lipids can be prepared by extruding through filters of decreasing size, as described in Templeton et al., Nature Biotech, 15:647-652, 1997, the teachings of which relating to extruded lipid preparation are incorporated herein by reference.

[0682] Methods and compositions provided herein may comprise a pharmaceutical composition administered by a regimen sufficient to alleviate a symptom of a disease, disorder, and/or condition. In some aspects, the present disclosure provides methods of delivering a therapeutic by administering compositions as described herein.

### Modulating Gene Expression

[0683] The present disclosure is further directed, in part, to a method of modulating, e.g., decreasing, expression of a target gene, comprising providing an expression repressor (or a nucleic acid encoding the same, or pharmaceutical composition comprising said expression repressor nucleic acid) or an expression repression system described herein (or a nucleic acid encoding the same, or pharmaceutical composition comprising said expression repression system or nucleic acid), and contacting the target gene, and/or operably linked transcription control element(s) with the expression repressor or the expression repression system. In some embodiments, modulating, e.g., decreasing expression of a target gene, comprises modulation of transcription of a target gene, as compared with a reference value, e.g., transcription of a target gene, in absence of the expression repressor or the expression repression system. In some embodiments, the method of modulating, e.g., decreasing, expression of a target gene, are used ex vivo, e.g., on a cell from a subject, e.g., a mammalian subject, e.g., a human subject. In some embodiments, the method of modulating, e.g., decreasing, expression of a target gene, are used in vivo, e.g., on a mammalian subject, e.g., a human subject. In some embodiments, the method of modulating, e.g., decreasing, expression of a target gene, are used in vitro, e.g., on a cell or cell line described herein.

[0684] The present disclosure is further directed, in part to a method of treating a condition associated with over-expression of a target gene in a subject, comprising administering to the subject an expression repression system described herein (or a nucleic acid encoding the same, or pharmaceutical composition comprising said expression repression system or nucleic acid). Conditions associated with over-expression of particular genes are known to those of skill in the art. Such conditions include, but are not limited to, metabolic disorders, neuromuscular disorders, cancer (e.g., solid tumors), fibrosis, diabetes, urea disorders, immune disorders, inflammation, and arthritis.

[0685] The present disclosure is further directed, in part to a method of treating a condition associated with mis-regulation of the expression of a target gene in a subject, comprising administering to the subject an expression repression system described herein (or a nucleic acid encoding the same, or pharmaceutical composition comprising said expression repression system or nucleic acid). Without wishing to be bound by theory, it is thought that an expression repression system may be used to target (e.g., decrease expression of) a gene which modulates the expression of a target gene, thus altering expression of the target gene by altering expression of the modulating gene. Conditions associated with mis-regulation of the expression of particular genes are known to those of skill in the art. Such conditions include, but are not limited to metabolic disorders, neuromuscular disorders, cancer (e.g., solid tumors), fibrosis, diabetes, urea disorders, immune disorders, inflammation, and arthritis.

[0686] Methods and compositions as provided herein may treat a condition associated with over-expression or mis-regulation of a target gene by stably or transiently altering (e.g., decreasing) transcription of a target gene. In some embodiments, such a modulation persists for at least about 1 hr to about 30 days, or at least about 2 hrs, 6 hrs, 12 hrs, 18 hrs, 24 hrs, 2 days, 3, days, 4 days, 5 days, 6 days, 7 days, 8 days, 9 days, 10 days, 11 days, 12 days, 13 days, 14 days, 15 days, 16 days, 17 days, 18 days, 19 days, 20 days, 21 days, 22 days, 23 days, 24 days, 25 days, 26 days, 27 days, 28 days, 29 days, 30 days, or longer or any time therebetween. In some embodiments, such a modulation persists for at least 1, 2, 3, 4, 5, 6, 7, 8, 9, 10, 11, 12, 13, 14, 15, 16, 17, 18, 19, 20, 21, 22, 23, or 24 hours, or at least 1, 2, 3, 4, 5, 6, or 7 days, or at least 1, 2, 3, 4, or 5 weeks, or at least 1, 2, 3, 4, 5, 6, 7, 8, 9, 10, 11, or 12 months, or at least 1, 2, 3, 4, or 5 years (e.g., indefinitely). Optionally, such a modulation persists for no more than 10, 9, 8, 7, 6, 5, 4, 3, 2, or 1 years.

[0687] In some embodiments, a method or composition provided herein may decrease expression of a target gene in a cell by at least 10, 20, 30, 40, 50, 60, 70, 80, 90, or 100% (and optionally up to 100%) relative to expression of the target gene in a cell not contacted by the composition or treated with the method.

[0688] In some embodiments, a method provided herein may modulate, e.g., decrease, expression of a target gene by disrupting a genomic complex, e.g., an anchor sequence-mediated conjunction, associated with said target gene. A gene that is associated with an anchor sequence-mediated conjunction may be at least partially within a conjunction (that is, situated sequence-wise between a first and second anchor sequences), or it may be external to a conjunction in that it is not situated sequence-wise between a first and second anchor sequences, but is located on the same chromosome and in sufficient proximity to at least a first or a second anchor sequence such that its expression can be modulated by controlling the topology of the anchor sequence-mediated conjunction. Those of ordinary skill in the art will understand that distance in three-dimensional space between two elements (e.g., between the gene and the anchor sequence-mediated conjunction) may, in some embodiments, be more relevant than distance in terms of base pairs. In some embodiments, an external but associated gene is located within 2 Mb, within 1.9 Mb, within 1.8 Mb, within 1.7 Mb, within 1.6 Mb, within 1.5 Mb, within 1.4 Mb, with 1.3 Mb, within 1.3 Mb, within 1.2 Mb, within 1.1 Mb, within 1 Mb, within 900 kb, within 800 kb, within 700 kb, within 500 kb, within 400 kb, within 300 kb, within 200 kb, within 100 kb, within 50 kb, within 20 kb, within 10 kb, or within 5 kb of the first or second anchor sequence.

[0689] In some embodiments, modulating expression of a gene comprises altering accessibility of a transcriptional control sequence to a gene. A transcriptional control sequence, whether internal or external to an anchor sequence-mediated conjunction, can be an enhancing sequence or a silencing (or repressive) sequence.

### Epigenetic Modification

[0690] The present disclosure is further directed, in part, to a method of epigenetically modifying a target gene, a transcription control element operably linked to a target gene, or an anchor sequence (e.g., an anchor sequence proximal to a target gene or associated with an anchor sequence-mediated conjunction operably linked to a target gene), the method comprising providing an expression repression system (e.g., expression repressor(s)), or nucleic acid encoding the same or pharmaceutical composition comprising said expression repression system or nucleic acid; and contacting the target gene or a transcription control element operably linked to the target gene with the expression repression system, thereby epigenetically modifying the target gene or a transcription control element operably linked to the target gene.

[0691] In some embodiments, a method of epigenetically modifying a target gene or a transcription control element operably linked to a target gene comprises increasing or decreasing DNA methylation of the target gene or a transcription control element operably linked to a target gene. In some embodiments, a method of epigenetically modifying a target gene or a transcription control element operably linked to a target gene comprises increasing or decreasing histone methylation of a histone associated with the target gene or a transcription control element operably linked to a target gene. In some embodiments, a method of epigenetically modifying a target gene or a transcription control element operably linked to a target gene comprises decreasing histone acetylation of a histone associated with the target gene, or a transcription control element operably linked to a target gene. In some embodiments, a method of epigenetically modifying a target gene or a transcription control element operably linked to a target gene comprises increasing or decreasing histone sumoylation of a histone associated with the target gene or a transcription control element operably linked to a target gene. In some embodiments, a method of epigenetically modifying a target gene or a transcription control element operably linked to a target gene comprises increasing or decreasing histone phosphorylation of a histone associated with the target gene or a transcription control element operably linked to a target gene.

[0692] In some embodiments, a method of epigenetically modifying a target gene or a transcription control element operably linked to a target gene may decrease the level of the epigenetic modification by at least 10, 20, 30, 40, 50, 60, 70, 80, 90, or 100% (and optionally up to 100%) relative to the level of the epigenetic modification at that site in a cell not contacted by the composition or treated with the method. In some embodiments, a method of epigenetically modifying a target gene or a transcription control element operably linked to a target gene may increase the level of the epigenetic modification by at least 10, 20, 30, 40, 50, 60, 70, 80, 90, 100, 120, 140, 160, 180, 200, 300, 400, 500, 600, 700, 800, 900, or 1000% (and optionally up to 200, 300, 400, 500, 600, 700, 800, 900, 1000, or 2000%) relative to the level of the epigenetic modification at that site in a cell not contacted by the composition or treated with the method. In some embodiments epigenetic modification of a target gene or a transcription control element operably linked to a target gene may modify the level of expression of the target gene, e.g., as described herein.

[0693] In some embodiments, an epigenetic modification produced by a method described herein persists for at least about 1 hr to about 30 days, or at least about 2 hrs, 6 hrs, 12 hrs, 18 hrs, 24 hrs, 2 days, 3, days, 4 days, 5 days, 6 days, 7 days, 8 days, 9 days, 10 days, 11 days, 12 days, 13 days, 14 days, 15 days, 16 days, 17 days, 18 days, 19 days, 20 days, 21 days, 22 days, 23 days, 24 days, 25 days, 26 days, 27 days, 28 days, 29 days, 30 days, or longer or any time therebetween. In some embodiments, such a modulation persists for at least 1, 2, 3, 4, 5, 6, 7, 8, 9, 10, 11, 12, 13, 14, 15, 16, 17, 18, 19, 20, 21, 22, 23, or 24 hours, or at least 1, 2, 3, 4, 5, 6, or 7 days, or at least 1, 2, 3, 4, or 5 weeks, or at least 1, 2, 3, 4, 5, 6, 7, 8, 9, 10, 11, or 12 months, or at least 1, 2, 3, 4, or 5 years (e.g., indefinitely). Optionally, such a modulation persists for no more than 10, 9, 8, 7, 6, 5, 4, 3, 2, or 1 years.

[0694] In some embodiments, an expression repression system for use in a method of epigenetically modifying a target gene or a transcription control element operably linked to a target gene comprises an expression repressor comprising a repressor domain that is or comprises an epigenetic modifying moiety. For example, a repressor domain may be or comprise an epigenetic modifying moiety with DNA methyltransferase activity, and an endogenous or naturally occurring target sequence (e.g. a target gene or transcription control element) may be altered to increase its methylation (e.g., decreasing interaction of a transcription factor with a portion of target gene or transcription control element, decreasing binding of a nucleating protein to an anchor sequence, and/or disrupting or preventing an anchor sequence-mediated conjunction), or may be altered to decrease its methylation (e.g., increasing interaction of a transcription factor with a portion of a target gene or transcription control element, increasing binding of a nucleating protein to an anchor sequence, and/or promoting or increasing strength of an anchor sequence-mediated conjunction).

### Kits

[0695] The present disclosure further directed, in part, to a kit comprising an expression repressor or an expression repression system, e.g., expression repressor(s), described herein. In some embodiments, a kit comprises an expression repressor or an expression repression system (e.g., the expression repressor(s) of the expression repression system) and instructions for the use of said expression repressor or expression repression system. In some embodiments, a kit comprises a nucleic acid encoding the expression repressor or the expression repression system or a component thereof (e.g., the expression repressor(s) of the expression repression system) and instructions for the use of said nucleic acid and/or said expression repressor or the expression repression system. In some embodiments, a kit comprises a cell comprising a nucleic acid encoding the expression repressor or the expression repression system or a component thereof (e.g., the expression repressor(s) of the expression repression system) and instructions for the use of said cell, nucleic acid, and/or said expression repression system.

[0696] In some embodiments, a kit comprises a unit dosage of an expression repressor or an expression repression system, e.g., expression repressor(s), described herein, or a unit dosage of a nucleic acid, e.g., a vector, encoding an expression repressor or an expression repression system, e.g., expression repressor(s), described herein.

[0697] In some embodiments the kit further comprises b) a set of instructions comprising at least one method for treating a disease or modulating, e.g., decreasing the expression of target gene within a cell with said composition. In some embodiments, the kits can optionally include a delivery vehicle for said composition (e.g., a lipid nanoparticle). The reagents may be provided suspended in the excipient and/or delivery vehicle or may be provided as a separate component which can be later combined with the excipient and/or delivery vehicle. In some embodiments, the kits may optionally contain additional therapeutics to be co-administered with the compositions to affect the desired target gene expression. While the instructional materials typically comprise written or printed materials, they are not limited to such. Any medium capable of storing such instructions and communicating them to an end user is contemplated. Such media include but are not limited to electronic storage media (e.g., magnetic discs, tapes, cartridges, chips), optical media (e.g., CD ROM), and the like. Such media may include addresses to internet sites that provide such instructional materials.

[0698] In some embodiments, a kit comprises a unit dosage of an expression repressor an expression repression system, e.g., expression repressor(s), described herein, or a unit dosage of a nucleic acid, e.g., a vector, encoding an expression repression system, e.g., expression repressor(s), described herein.

[0699] The following examples are provided to further illustrate some embodiments of the present disclosure but are not intended to limit the scope of the disclosure; it will be understood by their exemplary nature that other procedures, methodologies, or techniques known to those skilled in the art may alternatively be used.

### EXAMPLES

### Example 1: Target Selection and Guide Design

[0700] The β-2-microglobulin (β2M) gene was targeted for down-regulation using an expression repression system of the disclosure. A first expression repressor comprising an S. pyogenes dCas9 and a KRAB domain (Sp-dCas9-KRAB, corresponding to SEQ ID NOs: 91-93) and a second expression repressor comprising S. aureus dCas9 and MQ1 (Sa-dCas9-MQ1, corresponding to SEQ ID Nos: 94-96) were used. Guide RNAs (comprising target-binding sequences corresponding to SEQ ID NOs: 1-5) targeted each expression repressor to an area of CpG hypomethylation in the promoter region of the β2M gene (FIG. 1), where methylation runs from 0 to 1 (0 to 100%) and where higher methylation is depicted by red bars. Each bar represents a CpG site. Blue guides (GD-28228 and GD-28229) were used to target Sp-dCas9-KRAB and orange guides (GD-28171, GD-28172 and GD-28173) were used to target Sa-dCas9-MQ1 to the CpG Island in the β2M promoter region.

### Example 2: β2M Expression Repression Using One or Two Expression Repressors

[0701] The guide RNAs of Example 1 were used to target the Sp-dCas9-KRAB expression repressor, the Sa-dCas9-MQ1 expression repressor, or both to the promoter region of β2M and the effects on β2M expression monitored by qPCR. mRNA encoding the expression repressor(s) and guide RNA(s) were delivered to cells in lipid nanoparticles (LNPs).

[0702] HepG2 cells were seeded in a 96 well plate at a density of 30,000 cells/well in 100 μL RPMI (+10% FBS, +Penn/Strep). Cells were allowed to attach for 24 hours prior to treatment with 0.125 ug RNA (1:1 mRNA: sgRNA by weight) per guide. RNA was delivered by LNP formulated with COATSOME SS-OP ionizable lipid (NOF America). LNPs were formulated with one mRNA and one guide, with the exception of the samples noted as “co-formulated” which were prepared with two guides, maintaining the same mRNA: guide weight ratio. Cells were incubated with the LNPs for 72 hours, following which the cells were harvested for β2M mRNA analysis by qPCR (FIG. 2), with β2M mRNA levels given relative to untreated control cells.

[0703] dCas9 alone targeted to the β2M promoter did not decrease β2M mRNA levels. The data shows that Sp-dCas9-KRAB or Sa-dCas9-MQ1 alone decreased β2M mRNA levels, with some variation in the decrease depending on the guide RNA(s) used. Sp-dCas9-KRAB and Sa-dCas9-MQ1 together decreased β2M mRNA levels on average more than either expression repressor alone, again with some variation in the decrease depending on the guide RNA(s) used. Use of an expression repression system comprising one or two expression repressors decreased expression of a target gene The expression repression system comprising two expression repressors appeared to decrease expression of the target gene more than a single expression repressor.

### Example 3: β2M Expression Repression Across Doses and Using Flow Cytometry

[0704] Guide RNA of Example 1 (GD-28228 for Sp-dCas9 and Sp-dCas9-KRAB; GD-28172 for Sa-dCas9-MQ1; or GD-28228 and GD-28172 for Sp-dCas9-KRAB and Sa-dCas9-MQ1) was used to target the Sp-dCas9-KRAB expression repressor, the Sa-dCas9-MQ1 expression repressor, or both to the promoter region of β2M and the effects on β2M expression monitored by qPCR and also by flow cytometry (using a fluorescent β2M to monitor β2M protein levels). mRNA encoding the expression repressor(s) and guide RNA(s) were delivered to cells in LNPs at different dosages and formulations.

[0705] HepG2 cells were seeded in a 12-well plate at a density of 330,000 cells/well 1.5 mL RPMI (+10% FBS, +Penn/Strep). Cells were allowed to attach for 24 hours prior to treatment with 1.25 ug or 2.5 ug RNA (1:1 mRNA: sgRNA by weight) per guide in 1 mL media. RNA was delivered by LNP formulated with COATSOME SS-OP ionizable lipid (NOF America). LNPs were formulated with one mRNA and one guide, with the exception of the samples noted as “co-formulated” which were prepared with two guides, maintaining the same mRNA: guide weight ratio. Cells were incubated with the LNPs for 72 hours, following which the cells were harvested for FACS and mRNA analysis by qPCR.

[0706] As seen in Example 2, dCas9 alone targeted to the β2M promoter did not decrease β2M mRNA levels. Sp-dCas9-KRAB or Sa-dCas9-MQ1 alone, and Sp-dCas9-KRAB and Sa-dCas9-MQ1 together decreased β2M mRNA levels (FIG. 3). Both 1.25 ug/ml and 2.5 ug/ml doses of the expression repressors (alone or together) decreased β2M mRNA levels, with the higher dose of Sp-dCas9-KRAB appearing to give a greater decrease than the lower dose. FACS monitoring of β2M protein levels showed that Sp-dCas9-KRAB or Sa-dCas9-MQ1 treated cells showed a decrease in the population of cells having the untreated level of β2M protein and the appearance of a new population of cells with a decreased level of β2M protein. These data are consistent with those of Example 2, showing that use of an expression repression system comprising one or two expression repressors decreases expression of a target gene, and that individual expression repressors decrease the levels of a protein encoded by the target gene too.

### Example 4: β2M Expression Repression Over Time

[0707] Guide RNA (GD-28228 for Sp-dCas9 and Sp-dCas9-KRAB; GD-28172 for Sa-dCas9-MQ1; or GD-28228 and GD-28172 for Sp-dCas9-KRAB and Sa-dCas9-MQ1) of Example 1 was used to target the Sp-dCas9-KRAB expression repressor, the Sa-dCas9-MQ1 expression repressor, or both to the promoter region of β2M and the effects on β2M expression monitored by qPCR. Cells were collected at different days after transfection to extract total RNA and probe for expression changes.

[0708] K562 cells were plated in a 24-well plate and transfected with MC3-based LNP formulation enclosing: dCas9 mRNA with β2M targeting guide RNA, Sp-dCas9-KRAB mRNA with β2M targeting guide RNA, Sa-dCas9-MQ1 mRNA with β2M targeting guide RNA, or a mixture of Sp-dCas9-KRAB and Sa-dCas9-MQ1 mRNAs with β2M targeting guide RNAs. Cells were collected at different days after transfection to extract total RNA and probe for expression changes in β2M mRNA (FIG. 4). Dotted lines indicate average untreated β2M mRNA levels over time (top) and average knockdown levels of β2M mRNA 24 hours post transfection (bottom).

[0709] Over a 22-day period, non-transfected (blue line) and dCas9 transfected (red line) cells don't change β2M expression, whereas Sp-dCas9-KRAB (green line) transfected cells have lower β2M mRNA levels in the initial days post-transfection, with maximum effect on day 2, but the repression is lost after day 5. Sa-dCas9-MQ1 (purple line) transfected cells show significant repression (up to 85% by day 4) of $2M mRNA levels and the repression is retained and then slowly the repression decreases somewhat as seen by the line remaining just under the dotted line in the figure at the end of the test period. Sp-dCas9-KRAB and Sa-dCas9-MQ1 combined transfection (orange line) did not give any added repression than what is already observed for Sa-dCas9-MQ1 alone (purple line).

[0710] These data show that use of an expression repression system comprising one or two expression repressors decreases expression of a target gene. Individual expression repressors such as those comprising MQ1 can repress expression of a target gene for an extended duration, and expression repression systems comprising more than one expression repressor, e.g., one of which is an expression repressor comprising MQ1, can repress expression of a target gene for an extended duration as well.

### Example 5: Durable Repression of B2M Expression after Promoter Methylation by DNA Methyltransferases

[0711] This example demonstrates methylation of B2M promoter region by treatment with LNPs containing various DNMTs and LNPs containing a guide targeting the dCas9 fusions to the B2M promoter region cause durable repression of B2M expression.

[0712] K-562 cells were seeded in 24 well plates at a density of 200,000 cells per well in 750 μL of growth medium (RPMI+10% FBS+pen/strep). mRNAs encoding effectors, dCas9-MQ1 (SEQ ID NO: 33), dCas9-DNMT3a/3L (m) (“m” denoting that the 3a region has the human sequence but the 3L region has the mouse sequence) (SEQ ID NO:36), dCas9-DNMT3a/3L (h (“h” denoting that both the 3a region and the 3L region have the human sequences) (SEQ ID NO:35), dCas9-DNMT1 (SEQ ID NO: 35), and dCas9-DNMT3B were formulated in MC3 lipids using a Precision NanoSystems NanoAssemblr Spark instrument. Single guide RNAs (sgRNAs) of SEQ ID NO: 21 were formulated in the same lipids in the same instrument in separate formulations. Stock LNP concentrations were 100 μg/mL. Cells were treated with LNPs encapsulating mRNAs and LNPs encapsulating sgRNAs in a 1:1 ratio at a final lipid concentration of 1.25 μg/mL and incubated thereafter. Each effector and guide combination were transfected in quadruplicate. At different timepoints after transfection, 200 μL of cells were removed and processed to extract total RNA and probe for expression changes and 200 μL of cells were moved into 550 μL of fresh media. This procedure continued until 18 days after the initial transfection. RNA was extracted using the RNeasy 96 Plus kits (Qiagen), converted to cDNA using LunaScript RT SuperMix (New England Biolabs) and used for RT-qPCR using a B2M specific TaqMan primer/probe set Assay with and the TaqMan™ Fast Advanced Master Mix (Thermo Fisher Scientific). Data is presented as fold change compared to un-transfected control using the ddCT method.

[0713] Results show, all the constructs described in this Example were able to repress B2M expression ranging from about 35% to 60%, 4 days after treatment relative to an untreated sample (FIG. 5). All the constructs were able to repress B2M expression ranging from about 15% to 30% at the end of 8 days relative to an untreated sample. At the end of 13 days, all effectors were able to repress B2M expression by about 45-55%, and at the end of 18 days, all effectors were able to repress B2M expression by about 30-40% relative to an untreated sample (FIG. 5).

### Example 6: Identification of Durable Repressors or Repressor Systems that Downregulate MYC Expression by Targeting a CTCF Site Located Upstream of MYC Gene in K-562 Cells

[0714] This example demonstrates identification of individual expression repressors or expression repression systems that downregulate MYC expression by targeting the CTCF site located upstream of MYC gene.

[0715] K-562 cells were grown in 96 well plates at a density of 1×10⁶ cell/mL in 100 μL of growth medium (RPMI+10% FBS+pen/strep). A sgRNA pool was prepared by mixing GD-29639 (SEQ ID NO: 11) and GD-29640 (SEQ ID NO: 12) in 1:1 ratio. A repression master plate was prepared by adding 5 μl of mRNAs encoding effectors or effector combinations from Table 4 in each well. After addition, 17.5 ng of each mRNA or combination of mRNAs were present in each well. After plating the master plates were stored frozen until the time of transfection.

TABLE 4
List of Expression repressors or expression
repression systems tested

| | Expression repressors or expression repression systems |
|---|---|
| 1 | No effector (Untreated) |
| 2 | dCas9 |
| 3 | dCas9-DNMT1 |
| 4 | dCas9-DNMT3B |
| 5 | G9A-dCas9 |
| 6 | dCas9-MQ1 |
| 7 | dCas9-HDAC8 |
| 8 | dCas9-DNMT3a/3L (h) |
| 9 | dCas9-DNMT3a/3L (m) |
| 10 | EZH2-dCas9 |
| 11 | dCas9-LSD1 |
| 12 | dCas9-KRAB |
| 13 | EZH2-dCas9-KRAB |
| 14 | G9A-dCas9-KRAB |
| 15 | FOG1-dCas9- FOG1 |
| 16 | dCas9-KRAB + FOG1-dCas9- FOG1 |
| 17 | EZH2-dCas9-KRAB + dCas9-HDAC8 |
| 18 | dCas9-LSD1 + dCas9-HDAC8 |
| 19 | G9A-dCas9-KRAB + EZH2-dCas9-KRAB |
| 20 | G9A-dCas9 + dCas9-HDAC8 |
| 21 | EZH2-dCas9 + dCas9-HDAC8 |
| 22 | dCas9-LSD1 + G9A-dCas9-KRAB |
| 23 | dCas9-LSD1 + EZH2-dCas9-KRAB |
| 24 | dCas9-LSD1 + EZH2-dCas9 |
| 25 | G9A-dCas9-KRAB + dCas9-HDAC8 |
| 26 | G9A-dCas9 + EZH2-dCas9 |
| 27 | dCas9-MQ1 + EZH2-dCas9-KRAB |
| 28 | dCas9-LSD1 + G9A-dCas9 |
| 29 | dCas9-MQ1 + dCas9-HDAC8 |
| 30 | dCas9-MQ1 + G9A-dCas9-KRAB |

[0716] Prior to transfection, 5 μl of sgRNA pool were added in each well so that 8.75 ng of each sgRNA were present in each well. The effector mRNA-sgRNA mix were diluted with Opti-MEM media (Thermo Fisher) to a total volume of 40 μl in each well. A transfection master mix of Lipofectamine™ MessengarMAX™ (Thermo Fisher) and Opti-MEM were prepared using a ratio of 0.3 μL of Lipofectamine™ MessengarMAX™ per 100 ng of total RNA as described in Table 5. Immediately before transfection, 35 μL of transfection master mix were added to each well containing RNA to bring the final volume to 75 μl and were incubated for 5 minutes at room temperature and was used to transfect K-562 cells. After transfection the cells were incubated at 37° C. with 5% CO₂ in standard incubator.

TABLE 5

| | | Per 96-well | Per 2, 96-well | Per 4, 96-well |
|---|---|---|---|---|
| Reagent | Per well | plate | plates | plates |
| MessengerMax | 4.2 | 189 | 378 | 756 |
| (μL) | | | | |
| Optimem (μL) | 30.8 | 1386 | 2772 | 5544 |

[0717] 24 hours after transfection, 100 μL of fresh media was added to each well. Sample collection started 48 hours post transfection and continued until 6 days. Cell suspension samples were collected at 48 hours, 72 hours, and 144-hour time point. Each time samples were removed for analysis equivalent volumes of fresh media was added and the incubations were continued. RNA was extracted using the Rneasy® Plus 96 kits (Qiagen), converted to cDNA using LunaScript® RT SuperMix (New England Biolabs) and used for RT-qPCR using a MYC specific Taqman primer/probe set assay with the Tagman™ Fast Advanced Master Mix (Thermo Scientific). Data was presented as fold change compared to dCas9 treated control using the ddCT method. The untreated and dCas9 samples were used as calibrators.

[0718] The experiment showed that, at least, cells treated with dCas9-DNMT3a/3L (h), dCas9-KRAB, FOG1-dCas9-FOG1, G9A-dCas9+EZH2-dCas9, dCas9-MQ1+EZH2-dCas9-KRAB, dCas9-LSD1+G9A-dCas9, dCas9-MQ1+dCas9-HDAC8, and dCas9-MQ1+G9A-dCas9-KRAB showed repression of MYC expression at 48 hour and/or 72-hour time point (FIG. 6).

### Example 7: Identification of Durable Repressors or Repression Systems that Downregulate β2M Expression by Targeting a Region Upstream of the β2M Transcription Start Site in K-562 Cells

[0719] This example demonstrates identification of individual expression repressors or expression repression systems that downregulate B2M expression by targeting the upstream region of β2M promoter.

[0720] K-562 cells were grown in 96 well plates at a density of 1×10⁶ cell/mL in 100 μL of growth medium (RPMI+10% FBS+pen/strep). A sgRNA pool was prepared by mixing GD-27634 (SEQ ID NO: 13) and GD-29500 (SEQ ID NO: 14) in 1:1 ratio. The effectors as described in Table X and sgRNA pool mix was used to transfect the cells following the protocol described in Example 6. Cell suspension samples were collected at 48 hours, 72 hours, 144-hour, 192 hours, and 240 hour time point and were processed using the protocol described in Example 6. Data was presented as fold change compared to dCas9 treated control using the ddCT method. The untreated and dCas9 samples were used as calibrators.

[0721] The data showed that, at least, cells treated with dCas9-HDAC8, dCas9-LSD1, dCas9-MQ1, FOG1-dCas9-FOG1, G9A-dCas9-KRAB, dCas9-DNMT3a/3L (h), G9A-dCas9, EZH2-dCas9-KRAB, dCas9-KRAB, EZH2-dCas9-KRAB+dCas9-HDAC8, dCas9-LSD1+EZH2-dCas9-KRAB, dCas9-LSD1+dCas9-HDAC8, dCas9-KRAB+FOG1-dCas9-FOG1, dCas9-MQ1+G9A-dCas9-KRAB, G9A-dCas9+EZH2-dCas9, dCas9-MQ1+EZH2-dCas9-KRAB, and dCas9-MQ1+dCas9-HDAC8 showed repression of β2M expression at 48 hour, 72 hour and/or 144 hour time point (FIG. 7).

### Example 8: Identification of Durable Repressors or Repression Systems that Downregulate HSPA1B Expression by Targeting a Region Downstream of the HSPA1B Transcription Start Site in K-562 Cells

[0722] This example demonstrates identification of individual expression repressors or expression repression systems that downregulate HSPA1B expression by targeting the downstream region of HSPA1B promoter.

[0723] K-562 cells were grown in 96 well plates at a density of 1×10⁶ cell/mL in 100 μL of growth medium (RPMI+10% FBS+pen/strep). A sgRNA pool was prepared by mixing GD-29542 (SEQ ID NO: 17) and GD-29544 (SEQ ID NO: 18) in 1:1 ratio. The effectors as described in Table 4 and sgRNA pool mix was used to transfect the cells following the protocol described in Example 6. Cell suspension samples were collected at 48 hours, 72 hours, and 144-hour time point and were processed using the protocol described in Example 6. Data was presented as fold change compared to dCas9 treated control using the ddCT method. The untreated and dCas9 samples were used as calibrators.

[0724] The data showed that, at least, cells treated with dCas9-HDAC8, EZH2-dCas9, dCas9-MQ1, dCas9-DNMT1, dCas9-DNMT3a/3L (h), dCas9-DNMT3a/3L (m), G9A-dCas9-KRAB, FOG1-dCas9-FOG1, G9A-dCas9, dCas9-KRAB, G9A-dCas9+dCas9-HDAC8, dCas9-LSD1+G9A-dCas9-KRAB, dCas9-LSD1+EZH2-dCas9, G9A-dCas9+EZH2-dCas9, dCas9-LSD1+EZH2-dCas9-KRAB, EZH2-dCas9+dCas9-HDAC8, dCas9-LSD1+dCas9-HDAC8, dCas9-MQ1+EZH2-dCas9-KRAB, dCas9-MQ1+dCas9-HDAC8, G9A-dCas9-KRAB+EZH2-dCas9-KRAB, dCas9-LSD1+G9A-dCas9, and dCas9-MQ1+G9A-dCas9-KRAB showed repression of HSPA1B expression at 48 hour, 72 hour and/or 144 hour time point (FIG. 8).

### Example 9: Identification of Durable Repressors or Repression Systems that Downregulate GATA1 Expression in K-562 Cells

[0725] This example demonstrates identification of individual expression repressors or expression repression systems that downregulate GATA1 expression in K-562 cells.

[0726] K-562 cells were grown in 96 well plates at a density of 1×10⁶ cell/mL in 100 μL of growth medium (RPMI+10% FBS+pen/strep). A sgRNA pool was prepared by mixing GD-29536 (SEQ ID NO: 19) and GD-29693 (SEQ ID NO: 20) in 1:1 ratio. The effectors as described in Table 4 and sgRNA pool mix was used to transfect the cells following the protocol described in Example 6. Cell suspension samples were collected at 48 hours, 72 hours, and 144-hour time point and were processed using the protocol described in Example 6. Data was presented as fold change compared to dCas9 treated control using the ddCT method. The untreated and dCas9 samples were used as calibrators.

[0727] The data showed that, at least, cells treated with dCas9-HDAC8, dCas9-LSD1+dCas9-HDAC8, dCas9-MQ1+dCas9-HDAC8, and G9A-dCas9+dCas9-HDAC8 showed repression of GATA1 expression at 48-hour, 72 hour and/or 144 hour time point (FIG. 9).

### EQUIVALENTS

[0728] It is to be understood that while the invention has been described in conjunction with the detailed description thereof, the foregoing description is intended to illustrate and not limit the scope of the invention, which is defined by the scope of the appended claims. Some aspects, advantages, and modifications are within the scope of the following claims.

We claim:

1. An expression repression system comprising:
a first expression repressor comprising a first DNA-targeting moiety and a first repressor domain, and
a second expression repressor comprising a second DNA-targeting moiety and a second repressor domain,
wherein the first DNA-targeting moiety specifically binds a first DNA sequence, and the second DNA-targeting moiety specifically binds a second DNA sequence different from the first DNA sequence, and
wherein the first repressor domain is different from the second repressor domain.

2. An expression repression system comprising:
a first expression repressor comprising a first DNA-targeting moiety and a first repressor domain, and
a second expression repressor comprising a second DNA-targeting moiety and a second repressor domain,
wherein the first or second repressor domain comprises an MQ1 domain or functional variant or fragment thereof,
wherein the first repressor domain is different from the second repressor domain.

3. The expression repression system of claim 2, wherein:
the first DNA-targeting moiety specifically binds a first DNA sequence, and the second DNA-targeting moiety specifically binds a second DNA sequence different from the first DNA sequence; or
the first DNA-targeting moiety and the second DNA-targeting moiety specifically bind the same DNA sequence.

4. The expression repression system of any of claims 1-3,
wherein the first DNA-targeting moiety comprises a first CRISPR/Cas molecule comprising a first CRISPR/Cas protein and first guide RNA, and the second DNA-targeting moiety comprises a second CRISPR/Cas molecule comprising a second CRISPR/Cas protein and a second guide RNA.

5. The expression repression system of any of claims 1-4:
wherein the first CRISPR/Cas protein comprises a different amino acid sequence than the second CRISPR/Cas protein.

6. The expression repression system of any of claims 1-5, wherein the first or second DNA-targeting moiety comprises a CRISPR/Cas molecule comprising a Cas protein or Cpf1 protein chosen from Table 1 or a variant (e.g., mutant) of any thereof.

7. The expression repression system of any of claims 1-6, wherein the first DNA-targeting moiety comprises a first CRISPR/Cas molecule comprising a Cas protein or Cpf1 protein chosen from Table 1 or a variant (e.g., mutant) of any thereof, and the second DNA-targeting moiety comprises a second CRISPR/Cas molecule comprising a different Cas protein or Cpf1 protein chosen from Table 1 or a variant (e.g., mutant) of any thereof.

8. The expression repression system of any of claims 1-7, wherein the first or second repressor domain comprises a histone methyltransferase activity (e.g., a protein chosen from SETDB1, SETDB2, EHMT2 (i.e., G9A), EHMT1 (i.e., GLP), SUV39H1, EZH2, EZH1, SUV39H2, SETD8, SUV420H1, SUV420H2, or a functional variant or fragment of any thereof, e.g., a SET domain of any thereof), a histone demethylase activity (e.g., a protein chosen from KDM1A (i.e., LSD1), KDM1B (i.e., LSD2), KDM2A, KDM2B, KDM5A, KDM5B, KDM5C, KDM5D, KDM4B, N066, or a functional variant or fragment of any thereof), a histone deacetylase activity (e.g., a protein chosen from HDAC1, HDAC2, HDAC3, HDAC4, HDAC5, HDAC6, HDAC7, HDAC8, HDAC9, HDAC10, HDAC11, SIRT1, SIRT2, SIRT3, SIRT4, SIRT5, SIRT6, SIRT7, SIRT8, SIRT9, or a functional variant or fragment of any thereof), a DNA methyltransferase activity (e.g., a protein chosen from MQ1, DNMT1, DNMT3A1, DNMT3A2, DNMT3B1, DNMT3B2, DNMT3B3, DNMT3B4, DNMT3B5, DNMT3B6, DNMT3L, or a functional variant or fragment of any thereof), or a transcription repressor activity (e.g., a protein chosen from KRAB, MeCP2, HP1, RBBP4, REST, FOG1, SUZ12, or a functional variant or fragment of any thereof).

9. The expression repression system of any of claims 1-8, wherein:
the first repressor domain comprises a protein chosen from SETDB1, SETDB2, EHMT2 (i.e., G9A), EHMT1 (i.e., GLP), SUV39H1, EZH2, EZH1, SUV39H2, SETD8, SUV420H1, SUV420H2, KDM1A (i.e., LSD1), KDM1B (i.e., LSD2), KDM2A, KDM2B, KDM5A, KDM5B, KDM5C, KDM5D, KDM4B, N066, HDAC1, HDAC2, HDAC3, HDAC4, HDAC5, HDAC6, HDAC7, HDAC8, HDAC9, HDAC10, HDAC11, SIRT1, SIRT2, SIRT3, SIRT4, SIRT5, SIRT6, SIRT7, SIRT8, SIRT9, MQ1, DNMT1, DNMT3A1, DNMT3A2, DNMT3B1, DNMT3B2, DNMT3B3, DNMT3B4, DNMT3B5, DNMT3B6, DNMT3L, KRAB, MeCP2, HP1, RBBP4, REST, FOG1, SUZ12, or a functional variant or fragment thereof, and
the second repressor domain comprises a different protein chosen from SETDB1, SETDB2, EHMT2 (i.e., G9A), EHMT1 (i.e., GLP), SUV39H1, EZH2, EZH1, SUV39H2, SETD8, SUV420H1, SUV420H2, KDM1A (i.e., LSD1), KDM1B (i.e., LSD2), KDM2A, KDM2B, KDM5A, KDM5B, KDM5C, KDM5D, KDM4B, N066, HDAC1, HDAC2, HDAC3, HDAC4, HDAC5, HDAC6, HDAC7, HDAC8, HDAC9, HDAC10, HDAC11, SIRT1, SIRT2, SIRT3, SIRT4, SIRT5, SIRT6, SIRT7, SIRT8, SIRT9, MQ1, DNMT1, DNMT3A1, DNMT3A2, DNMT3B1, DNMT3B2, DNMT3B3, DNMT3B4, DNMT3B5, DNMT3B6, DNMT3L, KRAB, MeCP2, HP1, RBBP4, REST, FOG1, SUZ12, or a functional variant or fragment thereof.

10. The expression repression system of any of claims 1-9, wherein the first repressor domain comprises KRAB, and the second repressor domain comprises DNMT3A (e.g., human DNMT3A).

11. The expression repression system of any of claims 1-9, wherein the first repressor domain comprises KRAB, and the second repressor domain comprises bacterial MQ1.

12. The expression repression system of any of claims 1-11, wherein the first or second DNA-targeting moiety is selected from a TAL effector molecule, a CRISPR/Cas molecule, a zinc finger domain, a tetR domain, a meganuclease, or an oligonucleotide.

13. The expression repression system of any of claims 1-12, wherein the first or second DNA-targeting moiety is or comprises a CRISPR/Cas molecule comprising a CRISPR/Cas protein (e.g., that is or comprises a Cas protein or Cpf1 protein chosen from Table 1 or a variant (e.g., mutant) of any thereof) and a guide RNA.

14. The expression repression system of any of claims 1-13, wherein:
the first DNA-targeting moiety is or comprises a CRISPR/Cas molecule comprising a CRISPR/Cas protein that is or comprises a Cas protein or Cpf1 protein chosen from Table 1 or a variant (e.g., mutant) of any thereof), and
the second DNA-targeting moiety is or comprises a CRISPR/Cas molecule comprising a different CRISPR/Cas protein that is or comprises a Cas protein or Cpf1 protein chosen from Table 1 or a variant (e.g., mutant) of any thereof).

15. The expression repression system of any of claims 1-14, wherein the first or the second DNA-targeting moiety specifically binds to:
a promoter sequence or to DNA proximal to a promoter sequence, e.g., a promoter sequence operably linked to a target gene;
an enhancer sequence or to DNA proximal to an enhancer sequence, e.g., an enhancer sequence that affects expression of and/or is operably linked to a target gene;
a target gene, e.g., sequence comprised between the transcription start site and stop codon of a target gene;
the transcription start site of a target gene;
an intron, e.g., a splice site associated with an intron, of a target gene; or
an exon of a target gene.

16. The expression repression system of any of claims 1-15, wherein the first DNA sequence is a first site within or proximal to a promoter operably linked to a target gene and the second DNA sequence is a second site within or proximal to the promoter operably linked to the target gene.

17. The expression repression system of any of claims 1-16, wherein the distance between the first DNA sequence and the second DNA sequence is at least 1, 2, 3, 4, 5, 6, 7, 8, 9, 10, 11, 12, 13, 14, 15, 16, 17, 18, 19, 20, 25, 30, 35, 40, 45, 50, 55, 60, 65, 70, 75, 80, 85, 90, 95, 100, 110, 120, 130, 140, 150, 160, 170, 180, 190, 200, 210, 220, 230, 240, 250, 260, 270, 280, 290, 300, 310, 320, 330, 340, 350, 360, 370, 380, 390, 400, 410, 420, 430, 440, 450, 460, 470, 480, 490, 500, 550, 600, 650, 700, 750, 800, 850, 900, 950, or 1000 base pairs or any size therebetween, e.g., 20-500 base pairs.

18. The expression repression system of any of claims 1-17, wherein the distance between the first DNA sequence and the second DNA sequence is no more than 100, 110, 120, 130, 140, 150, 160, 170, 180, 190, 200, 210, 220, 230, 240, 250, 260, 270, 280, 290, 300, 310, 320, 330, 340, 350, 360, 370, 380, 390, 400, 410, 420, 430, 440, 450, 460, 470, 480, 490, 500, 550, 600, 650, 700, 750, 800, 850, 900, 950, or 1000 base pairs or any size therebetween, e.g., 20-500 base pairs.

19. The expression repression system of any of claims 1-18, wherein the target gene is 3-2-microglobulin, MYC, HSPA1B, GATA1, APOB, FOXP3, CXCL1, CXCL2, CXCL3, CXCL4, CXCL5, CXCL6, CXCL6, CXCL7, and/or CXCL8.

20. The expression repression system of any of claims 1-19, wherein the first DNA-targeting moiety does not appreciably bind to the second DNA sequence and the second DNA-targeting moiety does not appreciably bind to the first DNA sequence, e.g., wherein the first DNA-targeting moiety binds the second DNA sequence with a K_{D} of at least 500, 600, 700, 800, 900, 1000, 2000, 5000, 10,000, or 100,000 nM, and the second DNA-targeting moiety binds the first DNA sequence with binds with a K_{D} of at least 500, 600, 700, 800, 900, 1000, 2000, 5000, 10,000, or 100,000 nM.

21. The expression repression system of any of claims 1-20, wherein binding of the first expression repressor to the first DNA sequence and/or binding of the second expression repressor to the second DNA sequence decreases expression of a target gene, e.g., a target gene operably linked to the first and/or second DNA sequence, in a cell, e.g., by 10, 20, 30, 40, 50, 60, 70, 80, 90, or 100% compared to expression in the absence of the first and/or second expression repressor.

22. The expression repression system of any of claims 1-21, wherein binding of the first and/or second expression repressor to the first and/or second DNA sequence appreciably decreases expression of a target gene, e.g., a target gene operably linked to the first and/or second DNA sequence, for a time period of at least 1, 2, 3, 4, 5, 6, 7, 8, 9, 10, 11, 12, 13, 14, 15, 16, 17, 18, 19, 20, 21, 22, 23, 24, or 25 days, or at least 1, 2, 3, 4, 5, 6, 7, 8, 9, or 10 cell divisions, e.g., as measured by ELISA or as described in Examples 2-4.

23. The expression repression system of either of claims 21 or 22, wherein expression is decreased by 10, 20, 30, 40, 50, 60, 70, 80, 90, or 100% compared to expression in the absence of the first and second expression repressors, e.g., as measured by ELISA or as described in Examples 2-4.

24. The expression repression system of any of claims 21-23, wherein binding of the first expression repressor to the first DNA sequence and the second expression repressor to the second DNA sequence appreciably decreases expression of a target gene, e.g., a target gene operably linked to the first DNA sequence, for a time period of at least 1, 2, 3, 4, 5, 6, 7, 8, 9, 10, 11, or 12 hours, or at least 1, 2, 3, 4, 5, 6, 7, 8, 9, 10, 11, 12, 13, 14, 15, 16, 17, 18, 19, 20, 21, 22, 23, 24, or 25 days, or at least 1, 2, 3, 4, 5, 6, 7, 8, 9, or 10 cell divisions, e.g., as measured by ELISA or as described in Examples 2-4.

25. The expression repression system of any of claims 21-24, wherein the decrease in expression resulting from the binding of the first expression repressor to the first DNA sequence and the second expression repressor to the second DNA sequence is greater than the decrease in expression resulting from the binding of the first expression repressor to the first DNA sequence or the binding of the second expression repressor to the second DNA sequence individually.

26. The expression repression system of claim 25, wherein the binding of the first expression repressor to the first DNA sequence and the second expression repressor to the second DNA sequence decreases expression 1.05× (i.e., 1.05 times), 1.1×, 1.15×, 1.2×, 1.25×, 1.3×, 1.35×, 1.4×, 1.45×, 1.5×, 1.6×, 1.7×, 1.8×, 1.9×, 2×, 3×, 4×, 5×, 6×, 7×, 8×, 9×, 10×, 20×, 50×, or 100× more than either the binding of the first expression repressor to the first DNA sequence or the binding of the second expression repressor to the second DNA sequence individually, e.g., as measured by ELISA or as described in Examples 2-4.

27. The expression repression system of any of claim 21-26, wherein the decrease in expression resulting from the binding of the first expression repressor to the first DNA sequence and the second expression repressor to the second DNA sequence persists for a longer time (e.g., more hours, days, or cell divisions) than the decrease in expression resulting from the binding of the first expression repressor to the first DNA sequence or the binding of the second expression repressor to the second DNA sequence individually.

28. The expression repression system of claim 27, wherein the binding of the first expression repressor to the first DNA sequence and the second expression repressor to the second DNA sequence decreases expression 1.05× (i.e., 1.05 times), 1.1×, 1.15×, 1.2×, 1.25×, 1.3×, 1.35×, 1.4×, 1.45×, 1.5×, 1.6×, 1.7×, 1.8×, 1.9×, 2×, 3×, 4×, 5×, 6×, 7×, 8×, 9×, 10×, 20×, 50×, or 100× longer (e.g., as measured in hours, days, or cell divisions) than either the binding of the first expression repressor to the first DNA sequence or the binding of the second expression repressor to the second DNA sequence individually, e.g., as measured by ELISA or as described in Examples 2-4.

29. The expression repression system of any of claims 1-28, wherein
the first expression repressor comprises a first DNA-targeting moiety comprising a CRISPR/Cas molecule comprising an S. pyogenes CRISPR/Cas protein selected from Table 1 or variant (e.g., mutant) thereof, e.g., an S. pyogenes dCas9, and a first repressor domain comprising KRAB or a functional variant or fragment thereof; and
the second expression repressor comprises a second DNA-targeting moiety comprising a CRISPR/Cas molecule comprising a S. aureus CRISPR/Cas protein selected from Table 1 or variant (e.g., mutant) thereof, e.g., an S. aureus dCas9, and a second repressor domain comprising bacterial MQ1 or a functional variant or fragment thereof.

30. A polypeptide comprising:
a DNA-targeting moiety; and
a repressor domain comprising bacterial MQ1 or a functional variant or fragment thereof.

31. A nucleic acid encoding:
the first expression repressor,
the second expression repressor,
the expression repression system (e.g., the first expression repressor and the second expression repressor), or the polypeptide of any of claims 1-30.

32. A vector comprising the nucleic acid of claim 31.

33. A cell comprising the expression repression system, nucleic acid, vector, or polypeptide of any of claims 1-32.

34. A pharmaceutical composition comprising the expression repression system, nucleic acid, polypeptide, or vector of any of claims 1-32, and at least one pharmaceutically acceptable excipient or carrier.

35. A method of decreasing expression of a target genomic sequence in a cell, comprising:
providing the expression repression system, nucleic acid, polypeptide, pharmaceutical composition, or vector of any of claims 1-32 or 34; and
contacting the cell with the expression repression system, nucleic acid, polypeptide, pharmaceutical composition, or vector,
thereby decreasing expression of the target genomic sequence.

36. A method of epigenetically modifying a target genomic sequence in a cell, comprising:
providing the expression repression system, nucleic acid, polypeptide, pharmaceutical composition, or vector of any of claims 1-32 or 34; and
contacting the cell with the expression repression system, nucleic acid, vector, polypeptide, or pharmaceutical composition,
thereby epigenetically modifying the target genomic sequence.

37. The method of either of claims 35 or 36, wherein the target genomic sequence is:
a target gene (e.g., a site within a target gene, e.g., an exon, intron, or splice site), e.g., the gene encoding β-2-microglobulin (β2M),
a transcription control element operably linked to a target gene, or
an anchor sequence proximal to a target gene or associated with an anchor sequence-mediated conjunction operably linked to the target gene.

38. The method of any of claims 35-37, wherein expression is:
decreased by 10, 20, 30, 40, 50, 60, 70, 80, 90, or 100% compared to expression in an otherwise similar cell in the absence of the expression repression system; and/or
decreased for a time period of at least 1, 2, 3, 4, 5, 6, 7, 8, 9, 10, 11, 12, 13, 14, 15, 16, 17, 18, 19, 20, 21, 22, 23, 24, or 25 days, or at least 1, 2, 3, 4, 5, 6, 7, 8, 9, or 10 cell divisions, e.g., as measured by ELISA or as described in Examples 2-4.

39. The method of any of claims 35-38, wherein the decrease in expression comprises a decrease in:
the level of RNA, e.g., mRNA, encoded by the target gene; and/or
the level of a protein encoded by the target gene.

40. The method of any of claims 35-39, wherein providing comprises:
contacting the cell with a nucleic acid, e.g., vector, encoding the expression repression system to the cell comprising the target gene; or
contacting the cell with a lipid nanoparticle (LNP) comprising the expression repression system or a nucleic acid, e.g., vector, encoding the expression repression system.

41. A method of treating a condition associated with over-expression or mis-regulation of a target gene in a subject, comprising:
administering the expression repression system, nucleic acid, polypeptide, pharmaceutical composition, or vector of any of claims 1-32 or 34 to the subject,
thereby treating a condition associated with over-expression of a target gene in a subject.

42. A method of making a cell comprising an expression repression system, the method comprising:
providing the expression repression system, nucleic acid, pharmaceutical composition, or vector of any of claims 1-29, 31, 32 or 34; and
contacting the cell with the expression repression system, nucleic acid, vector, or pharmaceutical composition,
thereby making a cell comprising an expression repression system.

The application's sequence listing, which the Patent Office published only in electronic form, follows.

SEQUENCE LISTING (100 sequences)

SEQ ID NO: 1 - DNA, 20 bp, Artificial Sequence
  Description of Artificial Sequence: Synthetic oligonucleotide
tctccttggtggcccgccgt

SEQ ID NO: 2 - DNA, 20 bp, Artificial Sequence
  Description of Artificial Sequence: Synthetic oligonucleotide
gtcccaaaggcgcggcgctg

SEQ ID NO: 3 - DNA, 21 bp, Artificial Sequence
  Description of Artificial Sequence: Synthetic oligonucleotide
ccctgctccccgccgaaaggg

SEQ ID NO: 4 - DNA, 21 bp, Artificial Sequence
  Description of Artificial Sequence: Synthetic oligonucleotide
ctctggctcccccagcgcagc

SEQ ID NO: 5 - DNA, 21 bp, Artificial Sequence
  Description of Artificial Sequence: Synthetic oligonucleotide
gtgaacgcgtggaggggcgct

SEQ ID NO: 6 - DNA, 20 bp, Unknown
  Description of Unknown: target sequence
acggcgggccaccaaggaga

SEQ ID NO: 7 - DNA, 20 bp, Unknown
  Description of Unknown: target sequence
cagcgccgcgcctttgggac

SEQ ID NO: 8 - DNA, 21 bp, Unknown
  Description of Unknown: target sequence
ccctttcggcggggagcaggg

SEQ ID NO: 9 - DNA, 21 bp, Unknown
  Description of Unknown: target sequence
gctgcgctgggggagccagag

SEQ ID NO: 10 - DNA, 21 bp, Unknown
  Description of Unknown: target sequence
agcgcccctccacgcgttcac

SEQ ID NO: 11 - DNA, 20 bp, Unknown
  Description of Unknown: target sequence
agggtgatgttcattagcag

SEQ ID NO: 12 - DNA, 20 bp, Unknown
  Description of Unknown: target sequence
tgcagaaggtccgaagaaag

SEQ ID NO: 13 - DNA, 20 bp, Unknown
  Description of Unknown: target sequence
gagacaggtgacggtccctg

SEQ ID NO: 14 - DNA, 20 bp, Unknown
  Description of Unknown: target sequence
gagtctcgtgatgtttaaga

SEQ ID NO: 15 - DNA, 5533 bp, Artificial Sequence
  Description of Artificial Sequence: Synthetic polynucleotide
aggaaataagagagaaaagaagagtaagaagaaatataagagccaccatggcccccaagaagaagcggaaggtgggcatccacggcgtgcccgccgccgacaagaagtacagcatcggcctggccatcggcaccaacagcgtgggctgggccgtgatcaccgacgagtacaaggtgcccagcaagaagttcaaggtgctgggcaacaccgaccggcacagcatcaagaagaacctgatcggcgccctgctgttcgacagcggcgagaccgccgaggccacccggctgaagcggaccgcccggcggcggtacacccggcggaagaaccggatctgctacctgcaggagatcttcagcaacgagatggccaaggtggacgacagcttcttccaccggctggaggagagcttcctggtggaggaggacaagaagcacgagcggcaccccatcttcggcaacatcgtggacgaggtggcctaccacgagaagtaccccaccatctaccacctgcggaagaagctggtggacagcaccgacaaggccgacctgcggctgatctacctggccctggcccacatgatcaagttccggggccacttcctgatcgagggcgacctgaaccccgacaacagcgacgtggacaagctgttcatccagctggtgcagacctacaaccagctgttcgaggagaaccccatcaacgccagcggcgtggacgccaaggccatcctgagcgcccggctgagcaagagccggcggctggagaacctgatcgcccagctgcccggcgagaagaagaacggcctgttcggcaacctgatcgccctgagcctgggcctgacccccaacttcaagagcaacttcgacctggccgaggacgccaagctgcagctgagcaaggacacctacgacgacgacctggacaacctgctggcccagatcggcgaccagtacgccgacctgttcctggccgccaagaacctgagcgacgccatcctgctgagcgacatcctgcgggtgaacaccgagatcaccaaggcccccctgagcgccagcatgatcaagcggtacgacgagcaccaccaggacctgaccctgctgaaggccctggtgcggcagcagctgcccgagaagtacaaggagatcttcttcgaccagagcaagaacggctacgccggctacatcgacggcggcgccagccaggaggagttctacaagttcatcaagcccatcctggagaagatggacggcaccgaggagctgctggtgaagctgaaccgggaggacctgctgcggaagcagcggaccttcgacaacggcagcatcccccaccagatccacctgggcgagctgcacgccatcctgcggcggcaggaggacttctaccccttcctgaaggacaaccgggagaagatcgagaagatcctgaccttccggatcccctactacgtgggccccctggcccggggcaacagccggttcgcctggatgacccggaaatccgaggagaccatcaccccctggaacttcgaggaggtggtggacaagggcgccagcgcccagagcttcatcgagcggatgaccaacttcgacaagaacctgcccaacgagaaggtgctgcccaagcacagcctgctgtacgagtacttcaccgtgtacaacgagctgaccaaggtgaagtacgtgaccgagggcatgcggaagcccgccttcctgagcggcgagcagaagaaggccatcgtggacctgctgttcaagaccaaccggaaggtgaccgtgaagcagctgaaggaggactacttcaagaagatcgagtgcttcgacagcgtggagatcagcggcgtggaggaccggttcaacgccagcctgggcacctaccacgacctgctgaagatcatcaaggacaaggacttcctggacaacgaggagaacgaggacatcctggaggacatcgtgctgaccctgaccctgttcgaggaccgggagatgatcgaggagcggctgaaaacctacgcccacctgttcgacgacaaggtgatgaagcagctgaagcggcggcggtacaccggctggggccggctgagccggaagctgatcaacggcatccgggacaagcagagcggcaagaccatcctggacttcctgaaatccgacggcttcgccaaccggaacttcatgcagctgatccacgacgacagcctgaccttcaaggaggacatccagaaggcccaggtgagcggccagggcgacagcctgcacgagcacatcgccaacctggccggcagccccgccatcaagaagggcatcctgcagaccgtgaaggtggtggacgagctggtgaaggtgatgggccggcacaagcccgagaacatcgtgatcgagatggcccgggagaaccagaccacccagaagggccagaagaacagccgggagcggatgaagcggatcgaggagggcatcaaggagctgggcagccagatcctgaaggagcaccccgtggagaacacccagctgcagaacgagaagctgtacctgtactacctgcagaacggccgggacatgtacgtggaccaggagctggacatcaaccggctgagcgactacgacgtggccgccatcgtgccccagagcttcctgaaggacgacagcatcgacaacaaggtgctgacccggagcgacaaggcccggggcaagagcgacaacgtgcccagcgaggaggtggtgaagaagatgaagaactactggcggcagctgctgaacgccaagctgatcacccagcggaagttcgacaacctgaccaaggccgagcggggcggcctgagcgagctggacaaggccggcttcatcaagcggcagctggtggagacccggcagatcaccaagcacgtggcccagatcctggacagccggatgaacaccaagtacgacgagaacgacaagctgatccgggaggtgaaggtgatcaccctgaaatccaagctggtgagcgacttccggaaggacttccagttctacaaggtgcgggagatcaacaactaccaccacgcccacgacgcctacctgaacgccgtggtgggcaccgccctgatcaagaagtaccccaagctggagagcgagttcgtgtacggcgactacaaggtgtacgacgtgcggaagatgatcgccaagagcgagcaggagatcggcaaggccaccgccaagtacttcttctacagcaacatcatgaacttcttcaagaccgagatcaccctggccaacggcgagatccggaagcggcccctgatcgagaccaacggcgagaccggcgagatcgtgtgggacaagggccgggacttcgccaccgtgcggaaggtgctgagcatgccccaggtgaacatcgtgaagaaaaccgaggtgcagaccggcggcttcagcaaggagagcatcctgcccaagcggaacagcgacaagctgatcgcccggaagaaggactgggaccccaagaagtacggcggcttcgacagccccaccgtggcctacagcgtgctggtggtggccaaggtggagaagggcaagagcaagaagctgaaatccgtgaaggagctgctgggcatcaccatcatggagcggagcagcttcgagaagaaccccatcgacttcctggaggccaagggctacaaggaggtgaagaaggacctgatcatcaagctgcccaagtacagcctgttcgagctggagaacggccggaagcggatgctggccagcgccggcgagctgcagaagggcaacgagctggccctgcccagcaagtacgtgaacttcctgtacctggccagccactacgagaagctgaagggcagccccgaggacaacgagcagaagcagctgttcgtggagcagcacaagcactacctggacgagatcatcgagcagatcagcgagttcagcaagcgggtgatcctggccgacgccaacctggacaaggtgctgagcgcctacaacaagcaccgggacaagcccatccgggagcaggccgagaacatcatccacctgttcaccctgaccaacctgggcgcccccgccgccttcaagtacttcgacaccaccatcgaccggaagcggtacaccagcaccaaggaggtgctggacgccaccctgatccaccagagcatcaccggcctgtacgagacccggatcgacctgagccagctgggcggcgacagcggcggcaagcggcccgccgccaccaagaaggccggccaggccaagaagaagaagtcgggcgggggtggctcagtggacgtgctgaggagaaggaaggactggaacgtgagactgcaagccttcttcaccagcgacaccggactggaatacgaggcccctaagctgtaccccgccattcccgccgctagacgcagacccattagagtgctctctctgtttgacggaatcgccaccggctatctggtgctgaaagagctgggcatcaaggtgggcaaatacgtggccagcgaggtgtgcgaggagtctatcgccgtcggaaccgtgaaacacgagggaaacatcaaatacgtgaacgacgtgaggaacatcaccaagaaaaacatcgaggagtggggccccttcgatctcgtgatcggcggcagcccttgcaacgatctctccaatgtgaaccccgccagaaagggactgtacgagggcaccggcagactgttcttcgagttctaccatctgctgaactacagcagacccaaggagggcgacgacagacccttcttctggatgttcgaaaacgtggtcgccatgaaggtgggcgataagagggacatcagcagatttctggagtgtaaccccgtcatgatcgatgccattaaggtcagcgccgcccacagagctaggtacttctggggaaatctgcccggcatgaatagacccgtgatcgcttccaagaacgacaagctggagctgcaagactgtctggagtacaatagaatcgctaagctcaagaaggtccagaccatcaccacaaaatccaacagcatcaagcaaggcaagaaccagctgttccccgtggtcatgaacggcaaggaggatgtgctctggtgcaccgagctggagaggatctttggcttccccgtgcactataccgatgtgtccaacatgggaagaggcgctagacagaaactgctgggaagaagctggagcgtgcccgtgattagacacctcttcgcccctctgaaggattacttcgcttgcgagggaggtggcggatcgggaaagcggcccgccgccaccaagaaggccggtcaggccaagaagaagaagggcagctacccctacgacgtgcccgactacgcctgagcggccgcttaattaagctgccttctgcggggcttgccttctggccatgcccttcttctctcccttgcacctgtacctcttggtctttgaataaagcctgagtaggaagtctagaaaaaaaaaaaaaaaaaaaaaaaaaaaaaaaaaaaaaaaaaaaaaaaaaaaaaaaaaaaaaaaaaaaaaaaaaaaaaaaa

SEQ ID NO: 16 - protein, 1763 aa, Artificial Sequence
  Description of Artificial Sequence: Synthetic polypeptide
MAPKKKRKVGIHGVPAADKKYSIGLAIGTNSVGWAVITDEYKVPSKKFKVLGNTDRHSIKKNLIGALLFDSGETAEATRLKRTARRRYTRRKNRICYLQEIFSNEMAKVDDSFFHRLEESFLVEEDKKHERHPIFGNIVDEVAYHEKYPTIYHLRKKLVDSTDKADLRLIYLALAHMIKFRGHFLIEGDLNPDNSDVDKLFIQLVQTYNQLFEENPINASGVDAKAILSARLSKSRRLENLIAQLPGEKKNGLFGNLIALSLGLTPNFKSNFDLAEDAKLQLSKDTYDDDLDNLLAQIGDQYADLFLAAKNLSDAILLSDILRVNTEITKAPLSASMIKRYDEHHQDLTLLKALVRQQLPEKYKEIFFDQSKNGYAGYIDGGASQEEFYKFIKPILEKMDGTEELLVKLNREDLLRKQRTFDNGSIPHQIHLGELHAILRRQEDFYPFLKDNREKIEKILTFRIPYYVGPLARGNSRFAWMTRKSEETITPWNFEEVVDKGASAQSFIERMTNFDKNLPNEKVLPKHSLLYEYFTVYNELTKVKYVTEGMRKPAFLSGEQKKAIVDLLFKTNRKVTVKQLKEDYFKKIECFDSVEISGVEDRFNASLGTYHDLLKIIKDKDFLDNEENEDILEDIVLTLTLFEDREMIEERLKTYAHLFDDKVMKQLKRRRYTGWGRLSRKLINGIRDKQSGKTILDFLKSDGFANRNFMQLIHDDSLTFKEDIQKAQVSGQGDSLHEHIANLAGSPAIKKGILQTVKVVDELVKVMGRHKPENIVIEMARENQTTQKGQKNSRERMKRIEEGIKELGSQILKEHPVENTQLQNEKLYLYYLQNGRDMYVDQELDINRLSDYDVAAIVPQSFLKDDSIDNKVLTRSDKARGKSDNVPSEEVVKKMKNYWRQLLNAKLITQRKFDNLTKAERGGLSELDKAGFIKRQLVETRQITKHVAQILDSRMNTKYDENDKLIREVKVITLKSKLVSDFRKDFQFYKVREINNYHHAHDAYLNAVVGTALIKKYPKLESEFVYGDYKVYDVRKMIAKSEQEIGKATAKYFFYSNIMNFFKTEITLANGEIRKRPLIETNGETGEIVWDKGRDFATVRKVLSMPQVNIVKKTEVQTGGFSKESILPKRNSDKLIARKKDWDPKKYGGFDSPTVAYSVLVVAKVEKGKSKKLKSVKELLGITIMERSSFEKNPIDFLEAKGYKEVKKDLIIKLPKYSLFELENGRKRMLASAGELQKGNELALPSKYVNFLYLASHYEKLKGSPEDNEQKQLFVEQHKHYLDEIIEQISEFSKRVILADANLDKVLSAYNKHRDKPIREQAENIIHLFTLTNLGAPAAFKYFDTTIDRKRYTSTKEVLDATLIHQSITGLYETRIDLSQLGGDSGGKRPAATKKAGQAKKKKSGGGGSVDVLRRRKDWNVRLQAFFTSDTGLEYEAPKLYPAIPAARRRPIRVLSLFDGIATGYLVLKELGIKVGKYVASEVCEESIAVGTVKHEGNIKYVNDVRNITKKNIEEWGPFDLVIGGSPCNDLSNVNPARKGLYEGTGRLFFEFYHLLNYSRPKEGDDRPFFWMFENVVAMKVGDKRDISRFLECNPVMIDAIKVSAAHRARYFWGNLPGMNRPVIASKNDKLELQDCLEYNRIAKLKKVQTITTKSNSIKQGKNQLFPVVMNGKEDVLWCTELERIFGFPVHYTDVSNMGRGARQKLLGRSWSVPVIRHLFAPLKDYFACEGGGGSGKRPAATKKAGQAKKKKGSYPYDVPDYA

SEQ ID NO: 17 - DNA, 20 bp, Unknown
  Description of Unknown: target sequence
cctgccctctgattggtcca

SEQ ID NO: 18 - DNA, 20 bp, Unknown
  Description of Unknown: target sequence
gcctcatcgagcttggtgat

SEQ ID NO: 19 - DNA, 20 bp, Unknown
  Description of Unknown: target sequence
ctgtggtgtcaaaagcacca

SEQ ID NO: 20 - DNA, 20 bp, Unknown
  Description of Unknown: target sequence
gaaccccagaagatgccagg

SEQ ID NO: 21 - DNA, 20 bp, Unknown
  Description of Unknown: target sequence
ggcgcgcaccccagatcgga

SEQ ID NO: 22 - DNA, 5704 bp, Artificial Sequence
  Description of Artificial Sequence: Synthetic polynucleotide
aggaaataagagagaaaagaagagtaagaagaaatataagagccaccatggcccccaagaagaagcggaaggtgggcatccacggcgtgcccgccgccgacaagaagtacagcatcggcctggccatcggcaccaacagcgtgggctgggccgtgatcaccgacgagtacaaggtgcccagcaagaagttcaaggtgctgggcaacaccgaccggcacagcatcaagaagaacctgatcggcgccctgctgttcgacagcggcgagaccgccgaggccacccggctgaagcggaccgcccggcggcggtacacccggcggaagaaccggatctgctacctgcaggagatcttcagcaacgagatggccaaggtggacgacagcttcttccaccggctggaggagagcttcctggtggaggaggacaagaagcacgagcggcaccccatcttcggcaacatcgtggacgaggtggcctaccacgagaagtaccccaccatctaccacctgcggaagaagctggtggacagcaccgacaaggccgacctgcggctgatctacctggccctggcccacatgatcaagttccggggccacttcctgatcgagggcgacctgaaccccgacaacagcgacgtggacaagctgttcatccagctggtgcagacctacaaccagctgttcgaggagaaccccatcaacgccagcggcgtggacgccaaggccatcctgagcgcccggctgagcaagagccggcggctggagaacctgatcgcccagctgcccggcgagaagaagaacggcctgttcggcaacctgatcgccctgagcctgggcctgacccccaacttcaagagcaacttcgacctggccgaggacgccaagctgcagctgagcaaggacacctacgacgacgacctggacaacctgctggcccagatcggcgaccagtacgccgacctgttcctggccgccaagaacctgagcgacgccatcctgctgagcgacatcctgcgggtgaacaccgagatcaccaaggcccccctgagcgccagcatgatcaagcggtacgacgagcaccaccaggacctgaccctgctgaaggccctggtgcggcagcagctgcccgagaagtacaaggagatcttcttcgaccagagcaagaacggctacgccggctacatcgacggcggcgccagccaggaggagttctacaagttcatcaagcccatcctggagaagatggacggcaccgaggagctgctggtgaagctgaaccgggaggacctgctgcggaagcagcggaccttcgacaacggcagcatcccccaccagatccacctgggcgagctgcacgccatcctgcggcggcaggaggacttctaccccttcctgaaggacaaccgggagaagatcgagaagatcctgaccttccggatcccctactacgtgggccccctggcccggggcaacagccggttcgcctggatgacccggaaatccgaggagaccatcaccccctggaacttcgaggaggtggtggacaagggcgccagcgcccagagcttcatcgagcggatgaccaacttcgacaagaacctgcccaacgagaaggtgctgcccaagcacagcctgctgtacgagtacttcaccgtgtacaacgagctgaccaaggtgaagtacgtgaccgagggcatgcggaagcccgccttcctgagcggcgagcagaagaaggccatcgtggacctgctgttcaagaccaaccggaaggtgaccgtgaagcagctgaaggaggactacttcaagaagatcgagtgcttcgacagcgtggagatcagcggcgtggaggaccggttcaacgccagcctgggcacctaccacgacctgctgaagatcatcaaggacaaggacttcctggacaacgaggagaacgaggacatcctggaggacatcgtgctgaccctgaccctgttcgaggaccgggagatgatcgaggagcggctgaaaacctacgcccacctgttcgacgacaaggtgatgaagcagctgaagcggcggcggtacaccggctggggccggctgagccggaagctgatcaacggcatccgggacaagcagagcggcaagaccatcctggacttcctgaaatccgacggcttcgccaaccggaacttcatgcagctgatccacgacgacagcctgaccttcaaggaggacatccagaaggcccaggtgagcggccagggcgacagcctgcacgagcacatcgccaacctggccggcagccccgccatcaagaagggcatcctgcagaccgtgaaggtggtggacgagctggtgaaggtgatgggccggcacaagcccgagaacatcgtgatcgagatggcccgggagaaccagaccacccagaagggccagaagaacagccgggagcggatgaagcggatcgaggagggcatcaaggagctgggcagccagatcctgaaggagcaccccgtggagaacacccagctgcagaacgagaagctgtacctgtactacctgcagaacggccgggacatgtacgtggaccaggagctggacatcaaccggctgagcgactacgacgtggccgccatcgtgccccagagcttcctgaaggacgacagcatcgacaacaaggtgctgacccggagcgacaaggcccggggcaagagcgacaacgtgcccagcgaggaggtggtgaagaagatgaagaactactggcggcagctgctgaacgccaagctgatcacccagcggaagttcgacaacctgaccaaggccgagcggggcggcctgagcgagctggacaaggccggcttcatcaagcggcagctggtggagacccggcagatcaccaagcacgtggcccagatcctggacagccggatgaacaccaagtacgacgagaacgacaagctgatccgggaggtgaaggtgatcaccctgaaatccaagctggtgagcgacttccggaaggacttccagttctacaaggtgcgggagatcaacaactaccaccacgcccacgacgcctacctgaacgccgtggtgggcaccgccctgatcaagaagtaccccaagctggagagcgagttcgtgtacggcgactacaaggtgtacgacgtgcggaagatgatcgccaagagcgagcaggagatcggcaaggccaccgccaagtacttcttctacagcaacatcatgaacttcttcaagaccgagatcaccctggccaacggcgagatccggaagcggcccctgatcgagaccaacggcgagaccggcgagatcgtgtgggacaagggccgggacttcgccaccgtgcggaaggtgctgagcatgccccaggtgaacatcgtgaagaaaaccgaggtgcagaccggcggcttcagcaaggagagcatcctgcccaagcggaacagcgacaagctgatcgcccggaagaaggactgggaccccaagaagtacggcggcttcgacagccccaccgtggcctacagcgtgctggtggtggccaaggtggagaagggcaagagcaagaagctgaaatccgtgaaggagctgctgggcatcaccatcatggagcggagcagcttcgagaagaaccccatcgacttcctggaggccaagggctacaaggaggtgaagaaggacctgatcatcaagctgcccaagtacagcctgttcgagctggagaacggccggaagcggatgctggccagcgccggcgagctgcagaagggcaacgagctggccctgcccagcaagtacgtgaacttcctgtacctggccagccactacgagaagctgaagggcagccccgaggacaacgagcagaagcagctgttcgtggagcagcacaagcactacctggacgagatcatcgagcagatcagcgagttcagcaagcgggtgatcctggccgacgccaacctggacaaggtgctgagcgcctacaacaagcaccgggacaagcccatccgggagcaggccgagaacatcatccacctgttcaccctgaccaacctgggcgcccccgccgccttcaagtacttcgacaccaccatcgaccggaagcggtacaccagcaccaaggaggtgctggacgccaccctgatccaccagagcatcaccggcctgtacgagacccggatcgacctgagccagctgggcggcgacaagcggcccgccgccaccaagaaggccggccaggccaagaagaagaaggcccgggacagcaaggtggagaacaagaccaagaagctgcgggtgttcgaggccttcgccggcatcggcgcccagcggaaggccctggagaaggtgcggaaggacgagtacgagatcgtgggcctggccgagtggtacgtgcccgccatcgtgatgtaccaggccatccacaacaacttccacaccaagctggagtacaagagcgtgagccgggaggagatgatcgactacctggagaacaagaccctgagctggaacagcaagaaccccgtgagcaacggctactggaagcggaagaaggacgacgagctgaagatcatctacaacgccatcaagctgagcgagaaggagggcaacatcttcgacatccgggacctgtacaagcggaccctgaagaacatcgacctgctgacctacagcttcccctgccaggacctgagccagcagggcatccagaagggcatgaagcggggcagcggcacccggagcggcctgctgtgggagatcgagcgggccctggacagcaccgagaagaacgacctgcccaagtacctgctgatggagaacgtgggcgccctgctgcacaagaagaacgaggaggagctgaaccagtggaagcagaagctggagagcctgggctaccagaacagcatcgaggtgctgaacgccgccgacttcggcagcagccaggcccggcggcgggtgttcatgatcagcaccctgaacgagttcgtggagctgcccaagggcgacaagaagcccaagagcatcaagaaggtgctgaacaagatcgtgagcgagaaggacatcctgaacaacctgctgaagtacaacctgaccgagttcaagaaaaccaagagcaacatcaacaaggccagcctgatcggctacagcaagttcaacagcgagggctacgtgtacgaccccgagttcaccggccccaccctgaccgccagcggcgccaacagccggatcaagatcaaggacggcagcaacatccggaagatgaacagcgacgagaccttcctgtacatcggcttcgacagccaggacggcaagcgggtgaacgagatcgagttcctgaccgagaaccagaagatcttcgtgtgcggcaacagcatcagcgtggaggtgctggaggccatcatcgacaagatcggcggccccagcagcggcggcaagcggcccgccgccaccaagaaggccggccaggccaagaagaagaagggcagctacccctacgacgtgcccgactacgcctgagcggccgcttaattaagctgccttctgcggggcttgccttctggccatgcccttcttctctcccttgcacctgtacctcttggtctttgaataaagcctgagtaggaagtctagaaaaaaaaaaaaaaaaaaaaaaaaaaaaaaaaaaaaaaaaaaaaaaaaaaaaaaaaaaaaaaaaaaaaaaaaaaaaaaaa

SEQ ID NO: 23 - DNA, 6010 bp, Artificial Sequence
  Description of Artificial Sequence: Synthetic polynucleotide
aggaaataagagagaaaagaagagtaagaagaaatataagagccaccatggcccccaagaagaagcggaaggtgggcatccacggcgtgcccgccgccgacaagaagtacagcatcggcctggccatcggcaccaacagcgtgggctgggccgtgatcaccgacgagtacaaggtgcccagcaagaagttcaaggtgctgggcaacaccgaccggcacagcatcaagaagaacctgatcggcgccctgctgttcgacagcggcgagaccgccgaggccacccggctgaagcggaccgcccggcggcggtacacccggcggaagaaccggatctgctacctgcaggagatcttcagcaacgagatggccaaggtggacgacagcttcttccaccggctggaggagagcttcctggtggaggaggacaagaagcacgagcggcaccccatcttcggcaacatcgtggacgaggtggcctaccacgagaagtaccccaccatctaccacctgcggaagaagctggtggacagcaccgacaaggccgacctgcggctgatctacctggccctggcccacatgatcaagttccggggccacttcctgatcgagggcgacctgaaccccgacaacagcgacgtggacaagctgttcatccagctggtgcagacctacaaccagctgttcgaggagaaccccatcaacgccagcggcgtggacgccaaggccatcctgagcgcccggctgagcaagagccggcggctggagaacctgatcgcccagctgcccggcgagaagaagaacggcctgttcggcaacctgatcgccctgagcctgggcctgacccccaacttcaagagcaacttcgacctggccgaggacgccaagctgcagctgagcaaggacacctacgacgacgacctggacaacctgctggcccagatcggcgaccagtacgccgacctgttcctggccgccaagaacctgagcgacgccatcctgctgagcgacatcctgcgggtgaacaccgagatcaccaaggcccccctgagcgccagcatgatcaagcggtacgacgagcaccaccaggacctgaccctgctgaaggccctggtgcggcagcagctgcccgagaagtacaaggagatcttcttcgaccagagcaagaacggctacgccggctacatcgacggcggcgccagccaggaggagttctacaagttcatcaagcccatcctggagaagatggacggcaccgaggagctgctggtgaagctgaaccgggaggacctgctgcggaagcagcggaccttcgacaacggcagcatcccccaccagatccacctgggcgagctgcacgccatcctgcggcggcaggaggacttctaccccttcctgaaggacaaccgggagaagatcgagaagatcctgaccttccggatcccctactacgtgggccccctggcccggggcaacagccggttcgcctggatgacccggaaatccgaggagaccatcaccccctggaacttcgaggaggtggtggacaagggcgccagcgcccagagcttcatcgagcggatgaccaacttcgacaagaacctgcccaacgagaaggtgctgcccaagcacagcctgctgtacgagtacttcaccgtgtacaacgagctgaccaaggtgaagtacgtgaccgagggcatgcggaagcccgccttcctgagcggcgagcagaagaaggccatcgtggacctgctgttcaagaccaaccggaaggtgaccgtgaagcagctgaaggaggactacttcaagaagatcgagtgcttcgacagcgtggagatcagcggcgtggaggaccggttcaacgccagcctgggcacctaccacgacctgctgaagatcatcaaggacaaggacttcctggacaacgaggagaacgaggacatcctggaggacatcgtgctgaccctgaccctgttcgaggaccgggagatgatcgaggagcggctgaaaacctacgcccacctgttcgacgacaaggtgatgaagcagctgaagcggcggcggtacaccggctggggccggctgagccggaagctgatcaacggcatccgggacaagcagagcggcaagaccatcctggacttcctgaaatccgacggcttcgccaaccggaacttcatgcagctgatccacgacgacagcctgaccttcaaggaggacatccagaaggcccaggtgagcggccagggcgacagcctgcacgagcacatcgccaacctggccggcagccccgccatcaagaagggcatcctgcagaccgtgaaggtggtggacgagctggtgaaggtgatgggccggcacaagcccgagaacatcgtgatcgagatggcccgggagaaccagaccacccagaagggccagaagaacagccgggagcggatgaagcggatcgaggagggcatcaaggagctgggcagccagatcctgaaggagcaccccgtggagaacacccagctgcagaacgagaagctgtacctgtactacctgcagaacggccgggacatgtacgtggaccaggagctggacatcaaccggctgagcgactacgacgtggccgccatcgtgccccagagcttcctgaaggacgacagcatcgacaacaaggtgctgacccggagcgacaaggcccggggcaagagcgacaacgtgcccagcgaggaggtggtgaagaagatgaagaactactggcggcagctgctgaacgccaagctgatcacccagcggaagttcgacaacctgaccaaggccgagcggggcggcctgagcgagctggacaaggccggcttcatcaagcggcagctggtggagacccggcagatcaccaagcacgtggcccagatcctggacagccggatgaacaccaagtacgacgagaacgacaagctgatccgggaggtgaaggtgatcaccctgaaatccaagctggtgagcgacttccggaaggacttccagttctacaaggtgcgggagatcaacaactaccaccacgcccacgacgcctacctgaacgccgtggtgggcaccgccctgatcaagaagtaccccaagctggagagcgagttcgtgtacggcgactacaaggtgtacgacgtgcggaagatgatcgccaagagcgagcaggagatcggcaaggccaccgccaagtacttcttctacagcaacatcatgaacttcttcaagaccgagatcaccctggccaacggcgagatccggaagcggcccctgatcgagaccaacggcgagaccggcgagatcgtgtgggacaagggccgggacttcgccaccgtgcggaaggtgctgagcatgccccaggtgaacatcgtgaagaaaaccgaggtgcagaccggcggcttcagcaaggagagcatcctgcccaagcggaacagcgacaagctgatcgcccggaagaaggactgggaccccaagaagtacggcggcttcgacagccccaccgtggcctacagcgtgctggtggtggccaaggtggagaagggcaagagcaagaagctgaaatccgtgaaggagctgctgggcatcaccatcatggagcggagcagcttcgagaagaaccccatcgacttcctggaggccaagggctacaaggaggtgaagaaggacctgatcatcaagctgcccaagtacagcctgttcgagctggagaacggccggaagcggatgctggccagcgccggcgagctgcagaagggcaacgagctggccctgcccagcaagtacgtgaacttcctgtacctggccagccactacgagaagctgaagggcagccccgaggacaacgagcagaagcagctgttcgtggagcagcacaagcactacctggacgagatcatcgagcagatcagcgagttcagcaagcgggtgatcctggccgacgccaacctggacaaggtgctgagcgcctacaacaagcaccgggacaagcccatccgggagcaggccgagaacatcatccacctgttcaccctgaccaacctgggcgcccccgccgccttcaagtacttcgacaccaccatcgaccggaagcggtacaccagcaccaaggaggtgctggacgccaccctgatccaccagagcatcaccggcctgtacgagacccggatcgacctgagccagctgggcggcgacagcggcggcaagcggcccgccgccaccaagaaggccggccaggccaagaagaagaagtcgggcgggggtggctcagtggatctgaggacactcgacgtgtttagcggatgcggcggactctccgaaggcttccaccaagccggaatttccgacacactctgggccattgagatgtgggaccccgccgctcaagccttcagactgaataatcccggctccaccgtgttcaccgaggactgcaacattctgctgaagctggtgatggctggcgaaaccaccaactctagaggccagaggctgccccagaagggagatgtggaaatgctctgtggaggccctccttgccaaggcttctccggcatgaacaggttcaactctagaacatacagcaagttcaagaactctctggtcgtgagctttctgagctactgcgactactatagacctaggttctttctgctggagaacgtgagaaatttcgtgtccttcaagaggagcatggtgctgaagctgacactgaggtgtctggtgaggatgggctaccagtgcacattcggagtgctgcaagctggccagtacggcgtggcccagaccagaaggagggccatcattctggctgctgcccccggcgagaaactccctctgttccccgagcccctccacgtgttcgcccctagagcttgccagctgagcgtggtggtcgacgataagaagttcgtgagcaacatcacaaggctgtccagcggacccttcagaaccattaccgtgagggataccatgtccgacctccccgaggtgaggaatggcgccagcgctctggagatttcctacaacggcgaacctcagagctggttccaaaggcagctgagaggcgctcagtatcagcccattctgagggaccacatctgcaaagatatgagcgctctggtggccgctagaatgagacatattcctctggcccccggcagcgactggagagatctgcccaatattgaggtgagactcagcgacggaacaatggctagaaaactgaggtacacccatcatgatagaaagaacggaaggagcagcagcggcgctctgagaggagtgtgtagctgcgtggaagctggcaaggcttgcgatcccgccgctaggcagttcaataccctcatcccttggtgtctgcctcacaccggcaacagacacaatcattgggctggactgtatggaaggctcgaatgggacggctttttcagcaccaccgtgaccaatcccgaacctatgggcaagcaaggaagggtgctccaccccgagcagcatagagtcgtgtccgtgagagaatgcgctagaagccaaggcttccccgacacctatagactgttcggcaacattctggataagcacagacaagtgggaaatgctgtccctcctcctctggccaaggctatcggactggagatcaagctgtgtatgctcgccaaagctagggagagcgcttccgccaagattaaggaggaggaggccgccaaggacggaggtggcggatcgggaaagcggcccgccgccaccaagaaggccggtcaggccaagaagaagaagggcagctacccctacgacgtgcccgactacgcctgagcggccgcttaattaagctgccttctgcggggcttgccttctggccatgcccttcttctctcccttgcacctgtacctcttggtctttgaataaagcctgagtaggaagtctagaaaaaaaaaaaaaaaaaaaaaaaaaaaaaaaaaaaaaaaaaaaaaaaaaaaaaaaaaaaaaaaaaaaaaaaaaaaaaaaa

SEQ ID NO: 24 - DNA, 6202 bp, Artificial Sequence
  Description of Artificial Sequence: Synthetic polynucleotide
aggaaataagagagaaaagaagagtaagaagaaatataagagccaccatggcccccaagaagaagcggaaggtgggcatccacggcgtgcccgccgccgacaagaagtacagcatcggcctggccatcggcaccaacagcgtgggctgggccgtgatcaccgacgagtacaaggtgcccagcaagaagttcaaggtgctgggcaacaccgaccggcacagcatcaagaagaacctgatcggcgccctgctgttcgacagcggcgagaccgccgaggccacccggctgaagcggaccgcccggcggcggtacacccggcggaagaaccggatctgctacctgcaggagatcttcagcaacgagatggccaaggtggacgacagcttcttccaccggctggaggagagcttcctggtggaggaggacaagaagcacgagcggcaccccatcttcggcaacatcgtggacgaggtggcctaccacgagaagtaccccaccatctaccacctgcggaagaagctggtggacagcaccgacaaggccgacctgcggctgatctacctggccctggcccacatgatcaagttccggggccacttcctgatcgagggcgacctgaaccccgacaacagcgacgtggacaagctgttcatccagctggtgcagacctacaaccagctgttcgaggagaaccccatcaacgccagcggcgtggacgccaaggccatcctgagcgcccggctgagcaagagccggcggctggagaacctgatcgcccagctgcccggcgagaagaagaacggcctgttcggcaacctgatcgccctgagcctgggcctgacccccaacttcaagagcaacttcgacctggccgaggacgccaagctgcagctgagcaaggacacctacgacgacgacctggacaacctgctggcccagatcggcgaccagtacgccgacctgttcctggccgccaagaacctgagcgacgccatcctgctgagcgacatcctgcgggtgaacaccgagatcaccaaggcccccctgagcgccagcatgatcaagcggtacgacgagcaccaccaggacctgaccctgctgaaggccctggtgcggcagcagctgcccgagaagtacaaggagatcttcttcgaccagagcaagaacggctacgccggctacatcgacggcggcgccagccaggaggagttctacaagttcatcaagcccatcctggagaagatggacggcaccgaggagctgctggtgaagctgaaccgggaggacctgctgcggaagcagcggaccttcgacaacggcagcatcccccaccagatccacctgggcgagctgcacgccatcctgcggcggcaggaggacttctaccccttcctgaaggacaaccgggagaagatcgagaagatcctgaccttccggatcccctactacgtgggccccctggcccggggcaacagccggttcgcctggatgacccggaaatccgaggagaccatcaccccctggaacttcgaggaggtggtggacaagggcgccagcgcccagagcttcatcgagcggatgaccaacttcgacaagaacctgcccaacgagaaggtgctgcccaagcacagcctgctgtacgagtacttcaccgtgtacaacgagctgaccaaggtgaagtacgtgaccgagggcatgcggaagcccgccttcctgagcggcgagcagaagaaggccatcgtggacctgctgttcaagaccaaccggaaggtgaccgtgaagcagctgaaggaggactacttcaagaagatcgagtgcttcgacagcgtggagatcagcggcgtggaggaccggttcaacgccagcctgggcacctaccacgacctgctgaagatcatcaaggacaaggacttcctggacaacgaggagaacgaggacatcctggaggacatcgtgctgaccctgaccctgttcgaggaccgggagatgatcgaggagcggctgaaaacctacgcccacctgttcgacgacaaggtgatgaagcagctgaagcggcggcggtacaccggctggggccggctgagccggaagctgatcaacggcatccgggacaagcagagcggcaagaccatcctggacttcctgaaatccgacggcttcgccaaccggaacttcatgcagctgatccacgacgacagcctgaccttcaaggaggacatccagaaggcccaggtgagcggccagggcgacagcctgcacgagcacatcgccaacctggccggcagccccgccatcaagaagggcatcctgcagaccgtgaaggtggtggacgagctggtgaaggtgatgggccggcacaagcccgagaacatcgtgatcgagatggcccgggagaaccagaccacccagaagggccagaagaacagccgggagcggatgaagcggatcgaggagggcatcaaggagctgggcagccagatcctgaaggagcaccccgtggagaacacccagctgcagaacgagaagctgtacctgtactacctgcagaacggccgggacatgtacgtggaccaggagctggacatcaaccggctgagcgactacgacgtggccgccatcgtgccccagagcttcctgaaggacgacagcatcgacaacaaggtgctgacccggagcgacaaggcccggggcaagagcgacaacgtgcccagcgaggaggtggtgaagaagatgaagaactactggcggcagctgctgaacgccaagctgatcacccagcggaagttcgacaacctgaccaaggccgagcggggcggcctgagcgagctggacaaggccggcttcatcaagcggcagctggtggagacccggcagatcaccaagcacgtggcccagatcctggacagccggatgaacaccaagtacgacgagaacgacaagctgatccgggaggtgaaggtgatcaccctgaaatccaagctggtgagcgacttccggaaggacttccagttctacaaggtgcgggagatcaacaactaccaccacgcccacgacgcctacctgaacgccgtggtgggcaccgccctgatcaagaagtaccccaagctggagagcgagttcgtgtacggcgactacaaggtgtacgacgtgcggaagatgatcgccaagagcgagcaggagatcggcaaggccaccgccaagtacttcttctacagcaacatcatgaacttcttcaagaccgagatcaccctggccaacggcgagatccggaagcggcccctgatcgagaccaacggcgagaccggcgagatcgtgtgggacaagggccgggacttcgccaccgtgcggaaggtgctgagcatgccccaggtgaacatcgtgaagaaaaccgaggtgcagaccggcggcttcagcaaggagagcatcctgcccaagcggaacagcgacaagctgatcgcccggaagaaggactgggaccccaagaagtacggcggcttcgacagccccaccgtggcctacagcgtgctggtggtggccaaggtggagaagggcaagagcaagaagctgaaatccgtgaaggagctgctgggcatcaccatcatggagcggagcagcttcgagaagaaccccatcgacttcctggaggccaagggctacaaggaggtgaagaaggacctgatcatcaagctgcccaagtacagcctgttcgagctggagaacggccggaagcggatgctggccagcgccggcgagctgcagaagggcaacgagctggccctgcccagcaagtacgtgaacttcctgtacctggccagccactacgagaagctgaagggcagccccgaggacaacgagcagaagcagctgttcgtggagcagcacaagcactacctggacgagatcatcgagcagatcagcgagttcagcaagcgggtgatcctggccgacgccaacctggacaaggtgctgagcgcctacaacaagcaccgggacaagcccatccgggagcaggccgagaacatcatccacctgttcaccctgaccaacctgggcgcccccgccgccttcaagtacttcgacaccaccatcgaccggaagcggtacaccagcaccaaggaggtgctggacgccaccctgatccaccagagcatcaccggcctgtacgagacccggatcgacctgagccagctgggcggcgacagcgccggcggcggcggcagcggcggcggcggcagcggcggcggcggcagcggccccaagaagaagcggaaggtggccgccgccggcagcaaccacgaccaggagttcgacccccccaaggtgtacccccccgtgcccgccgagaagcggaagcccatccgggtgctgagcctgttcgacggcatcgccaccggcctgctggtgctgaaggacctgggcatccaggtggaccggtacatcgccagcgaggtgtgcgaggacagcatcaccgtgggcatggtgcggcaccagggcaagatcatgtacgtgggcgacgtgcggagcgtgacccagaagcacatccaggagtggggccccttcgacctggtgatcggcggcagcccctgcaacgacctgagcatcgtgaaccccgcccggaagggcctgtacgagggcaccggccggctgttcttcgagttctaccggctgctgcacgacgcccggcccaaggagggcgacgaccggcccttcttctggctgttcgagaacgtggtggccatgggcgtgagcgacaagcgggacatcagccggttcctggagagcaaccccgtgatgatcgacgccaaggaggtgagcgccgcccaccgggcccggtacttctggggcaacctgcccggcatgaaccggcccctggccagcaccgtgaacgacaagctggagctgcaggagtgcctggagcacggccggatcgccaagttcagcaaggtgcggaccatcaccacccggagcaacagcatcaagcagggcaaggaccagcacttccccgtgttcatgaacgagaaggaggacatcctgtggtgcaccgagatggagcgggtgttcggcttccccgtgcactacaccgacgtgagcaacatgagccggctggcccggcagcggctgctgggccggagctggagcgtgcccgtgatccggcacctgttcgcccccctgaaggagtacttcgcctgcgtgagcagcggcaacagcaacgccaacagccggggccccagcttcagcagcggcctggtgcccctgagcctgcggggcagccacatgaatcctctggagatgttcgagacagtgcccgtgtggagaaggcaacccgtgagggtgctgagcctcttcgaggacattaagaaggagctgacctctctgggctttctggaatccggcagcgaccccggccagctgaaacacgtggtggacgtgaccgacacagtgaggaaggacgtggaagagtggggcccctttgacctcgtgtatggagccacacctcctctcggccacacatgcgataggcctcccagctggtatctcttccagttccacagactgctccagtacgccagacctaagcccggcagccccagacccttcttctggatgttcgtggacaatctggtgctgaacaaggaggatctggatgtggccagcagatttctggagatggaacccgtgacaatccccgacgtgcatggcggctctctgcagaacgccgtgagagtgtggtccaacatccccgccattagaagcagacactgggctctggtgagcgaggaggaactgtctctgctggcccagaataagcagtcctccaagctggccgccaagtggcccaccaagctggtgaagaactgctttctgcctctgagggagtatttcaagtatttcagcaccgaactgaccagcagcctgagcggcggcaagcggcccgccgccaccaagaaggccggccaggccaagaagaagaagggcagctacccctacgacgtgcccgactacgcctgagcggccgcttaattaagctgccttctgcggggcttgccttctggccatgcccttcttctctcccttgcacctgtacctcttggtctttgaataaagcctgagtaggaagtctagaaaaaaaaaaaaaaaaaaaaaaaaaaaaaaaaaaaaaaaaaaaaaaaaaaaaaaaaaaaaaaaaaaaaaaaaaaaaaaaa

SEQ ID NO: 25 - DNA, 6205 bp, Artificial Sequence
  Description of Artificial Sequence: Synthetic polynucleotide
aggaaataagagagaaaagaagagtaagaagaaatataagagccaccatggcccccaagaagaagcggaaggtgggcatccacggcgtgcccgccgccgacaagaagtacagcatcggcctggccatcggcaccaacagcgtgggctgggccgtgatcaccgacgagtacaaggtgcccagcaagaagttcaaggtgctgggcaacaccgaccggcacagcatcaagaagaacctgatcggcgccctgctgttcgacagcggcgagaccgccgaggccacccggctgaagcggaccgcccggcggcggtacacccggcggaagaaccggatctgctacctgcaggagatcttcagcaacgagatggccaaggtggacgacagcttcttccaccggctggaggagagcttcctggtggaggaggacaagaagcacgagcggcaccccatcttcggcaacatcgtggacgaggtggcctaccacgagaagtaccccaccatctaccacctgcggaagaagctggtggacagcaccgacaaggccgacctgcggctgatctacctggccctggcccacatgatcaagttccggggccacttcctgatcgagggcgacctgaaccccgacaacagcgacgtggacaagctgttcatccagctggtgcagacctacaaccagctgttcgaggagaaccccatcaacgccagcggcgtggacgccaaggccatcctgagcgcccggctgagcaagagccggcggctggagaacctgatcgcccagctgcccggcgagaagaagaacggcctgttcggcaacctgatcgccctgagcctgggcctgacccccaacttcaagagcaacttcgacctggccgaggacgccaagctgcagctgagcaaggacacctacgacgacgacctggacaacctgctggcccagatcggcgaccagtacgccgacctgttcctggccgccaagaacctgagcgacgccatcctgctgagcgacatcctgcgggtgaacaccgagatcaccaaggcccccctgagcgccagcatgatcaagcggtacgacgagcaccaccaggacctgaccctgctgaaggccctggtgcggcagcagctgcccgagaagtacaaggagatcttcttcgaccagagcaagaacggctacgccggctacatcgacggcggcgccagccaggaggagttctacaagttcatcaagcccatcctggagaagatggacggcaccgaggagctgctggtgaagctgaaccgggaggacctgctgcggaagcagcggaccttcgacaacggcagcatcccccaccagatccacctgggcgagctgcacgccatcctgcggcggcaggaggacttctaccccttcctgaaggacaaccgggagaagatcgagaagatcctgaccttccggatcccctactacgtgggccccctggcccggggcaacagccggttcgcctggatgacccggaaatccgaggagaccatcaccccctggaacttcgaggaggtggtggacaagggcgccagcgcccagagcttcatcgagcggatgaccaacttcgacaagaacctgcccaacgagaaggtgctgcccaagcacagcctgctgtacgagtacttcaccgtgtacaacgagctgaccaaggtgaagtacgtgaccgagggcatgcggaagcccgccttcctgagcggcgagcagaagaaggccatcgtggacctgctgttcaagaccaaccggaaggtgaccgtgaagcagctgaaggaggactacttcaagaagatcgagtgcttcgacagcgtggagatcagcggcgtggaggaccggttcaacgccagcctgggcacctaccacgacctgctgaagatcatcaaggacaaggacttcctggacaacgaggagaacgaggacatcctggaggacatcgtgctgaccctgaccctgttcgaggaccgggagatgatcgaggagcggctgaaaacctacgcccacctgttcgacgacaaggtgatgaagcagctgaagcggcggcggtacaccggctggggccggctgagccggaagctgatcaacggcatccgggacaagcagagcggcaagaccatcctggacttcctgaaatccgacggcttcgccaaccggaacttcatgcagctgatccacgacgacagcctgaccttcaaggaggacatccagaaggcccaggtgagcggccagggcgacagcctgcacgagcacatcgccaacctggccggcagccccgccatcaagaagggcatcctgcagaccgtgaaggtggtggacgagctggtgaaggtgatgggccggcacaagcccgagaacatcgtgatcgagatggcccgggagaaccagaccacccagaagggccagaagaacagccgggagcggatgaagcggatcgaggagggcatcaaggagctgggcagccagatcctgaaggagcaccccgtggagaacacccagctgcagaacgagaagctgtacctgtactacctgcagaacggccgggacatgtacgtggaccaggagctggacatcaaccggctgagcgactacgacgtggccgccatcgtgccccagagcttcctgaaggacgacagcatcgacaacaaggtgctgacccggagcgacaaggcccggggcaagagcgacaacgtgcccagcgaggaggtggtgaagaagatgaagaactactggcggcagctgctgaacgccaagctgatcacccagcggaagttcgacaacctgaccaaggccgagcggggcggcctgagcgagctggacaaggccggcttcatcaagcggcagctggtggagacccggcagatcaccaagcacgtggcccagatcctggacagccggatgaacaccaagtacgacgagaacgacaagctgatccgggaggtgaaggtgatcaccctgaaatccaagctggtgagcgacttccggaaggacttccagttctacaaggtgcgggagatcaacaactaccaccacgcccacgacgcctacctgaacgccgtggtgggcaccgccctgatcaagaagtaccccaagctggagagcgagttcgtgtacggcgactacaaggtgtacgacgtgcggaagatgatcgccaagagcgagcaggagatcggcaaggccaccgccaagtacttcttctacagcaacatcatgaacttcttcaagaccgagatcaccctggccaacggcgagatccggaagcggcccctgatcgagaccaacggcgagaccggcgagatcgtgtgggacaagggccgggacttcgccaccgtgcggaaggtgctgagcatgccccaggtgaacatcgtgaagaaaaccgaggtgcagaccggcggcttcagcaaggagagcatcctgcccaagcggaacagcgacaagctgatcgcccggaagaaggactgggaccccaagaagtacggcggcttcgacagccccaccgtggcctacagcgtgctggtggtggccaaggtggagaagggcaagagcaagaagctgaaatccgtgaaggagctgctgggcatcaccatcatggagcggagcagcttcgagaagaaccccatcgacttcctggaggccaagggctacaaggaggtgaagaaggacctgatcatcaagctgcccaagtacagcctgttcgagctggagaacggccggaagcggatgctggccagcgccggcgagctgcagaagggcaacgagctggccctgcccagcaagtacgtgaacttcctgtacctggccagccactacgagaagctgaagggcagccccgaggacaacgagcagaagcagctgttcgtggagcagcacaagcactacctggacgagatcatcgagcagatcagcgagttcagcaagcgggtgatcctggccgacgccaacctggacaaggtgctgagcgcctacaacaagcaccgggacaagcccatccgggagcaggccgagaacatcatccacctgttcaccctgaccaacctgggcgcccccgccgccttcaagtacttcgacaccaccatcgaccggaagcggtacaccagcaccaaggaggtgctggacgccaccctgatccaccagagcatcaccggcctgtacgagacccggatcgacctgagccagctgggcggcgacagcgccggcggcggcggcagcggcggcggcggcagcggcggcggcggcagcggccccaagaagaagcggaaggtggccgccgccggcagcaaccacgaccaggagttcgacccccccaaggtgtacccccccgtgcccgccgagaagcggaagcccatccgggtgctgagcctgttcgacggcatcgccaccggcctgctggtgctgaaggacctgggcatccaggtggaccggtacatcgccagcgaggtgtgcgaggacagcatcaccgtgggcatggtgcggcaccagggcaagatcatgtacgtgggcgacgtgcggagcgtgacccagaagcacatccaggagtggggccccttcgacctggtgatcggcggcagcccctgcaacgacctgagcatcgtgaaccccgcccggaagggcctgtacgagggcaccggccggctgttcttcgagttctaccggctgctgcacgacgcccggcccaaggagggcgacgaccggcccttcttctggctgttcgagaacgtggtggccatgggcgtgagcgacaagcgggacatcagccggttcctggagagcaaccccgtgatgatcgacgccaaggaggtgagcgccgcccaccgggcccggtacttctggggcaacctgcccggcatgaaccggcccctggccagcaccgtgaacgacaagctggagctgcaggagtgcctggagcacggccggatcgccaagttcagcaaggtgcggaccatcaccacccggagcaacagcatcaagcagggcaaggaccagcacttccccgtgttcatgaacgagaaggaggacatcctgtggtgcaccgagatggagcgggtgttcggcttccccgtgcactacaccgacgtgagcaacatgagccggctggcccggcagcggctgctgggccggagctggagcgtgcccgtgatccggcacctgttcgcccccctgaaggagtacttcgcctgcgtgagcagcggcaacagcaacgccaacagccggggccccagcttcagcagcggcctggtgcccctgagcctgcggggcagccacatgggccccatggagatctacaagaccgtgagcgcctggaagcggcagcccgtgcgggtgctgagcctgttccggaacatcgacaaggtgctgaaatccctgggcttcctggagagcggcagcggcagcggcggcggcaccctgaagtacgtggaggacgtgaccaacgtggtgcggcgggacgtggagaagtggggccccttcgacctggtgtacggcagcacccagcccctgggcagcagctgcgaccggtgccccggctggtacatgttccagttccaccggatcctgcagtacgccctgccccggcaggagagccagcggcccttcttctggatcttcatggacaacctgctgctgaccgaggacgaccaggagaccaccacccggttcctgcagaccgaggccgtgaccctgcaggacgtgcggggccgggactaccagaacgccatgcgggtgtggagcaacatccccggcctgaaatccaagcacgcccccctgacccccaaggaggaggagtacctgcaggcccaggtgcggagccggagcaagctggacgcccccaaggtggacctgctggtgaagaactgcctgctgcccctgcgggagtacttcaagtacttcagccagaacagcctgcccctgagcggcggcaagcggcccgccgccaccaagaaggccggccaggccaagaagaagaagggcagctacccctacgacgtgcccgactacgcctgagcggccgcttaattaagctgccttctgcggggcttgccttctggccatgcccttcttctctcccttgcacctgtacctcttggtctttgaataaagcctgagtaggaagtctagaaaaaaaaaaaaaaaaaaaaaaaaaaaaaaaaaaaaaaaaaaaaaaaaaaaaaaaaaaaaaaaaaaaaaaaaaaaaaaaa

SEQ ID NO: 26 - DNA, 5368 bp, Artificial Sequence
  Description of Artificial Sequence: Synthetic polynucleotide
aggaaataagagagaaaagaagagtaagaagaaatataagagccaccatggcccccaagaagaagcggaaggtgggcatccacggcgtgcccgccgcctcgggcgggggtggctcaggaaatagggctatcagaaccgagaagatcatctgtagggacgtggctagaggctacgagaacgtgcccattccttgcgtgaatggcgtggatggcgaaccttgccccgaggactacaaatacatctccgagaactgcgaaaccagcacaatgaacatcgacagaaacatcacccacctccagcactgcacatgtgtggatgactgctcctccagcaactgtctgtgcggccagctctccatcagatgctggtacgacaaggacggcagactgctgcaagagttcaacaagatcgaaccccctctcatcttcgagtgtaaccaagcttgcagctgctggagaaactgcaagaatagagtggtccagagcggcatcaaggtgagactgcaactgtacagaaccgccaagatgggatggggagtgagggctctgcaaaccattccccaaggcaccttcatctgcgaatacgtgggcgaactgatctccgacgccgaagctgacgtgagagaggacgacagctatctcttcgatctggacaataaggacggcgaggtgtactgcatcgacgctagatattacggcaacatctctagattcatcaaccacctctgcgatcccaacatcattcccgtgagggtgttcatgctgcaccaagatctgaggttccctagaatcgccttcttcagctctagagacatcagaaccggcgaggagctgggcttcgattacggcgatagattctgggacatcaagtccaagtacttcacatgccagtgcggcagcgagaagtgtaagcacagcgctgaggccattgctctggagcagtctagactggccagactggatggaggtggcggatcgggagacaagaagtacagcatcggcctggccatcggcaccaacagcgtgggctgggccgtgatcaccgacgagtacaaggtgcccagcaagaagttcaaggtgctgggcaacaccgaccggcacagcatcaagaagaacctgatcggcgccctgctgttcgacagcggcgagaccgccgaggccacccggctgaagcggaccgcccggcggcggtacacccggcggaagaaccggatctgctacctgcaggagatcttcagcaacgagatggccaaggtggacgacagcttcttccaccggctggaggagagcttcctggtggaggaggacaagaagcacgagcggcaccccatcttcggcaacatcgtggacgaggtggcctaccacgagaagtaccccaccatctaccacctgcggaagaagctggtggacagcaccgacaaggccgacctgcggctgatctacctggccctggcccacatgatcaagttccggggccacttcctgatcgagggcgacctgaaccccgacaacagcgacgtggacaagctgttcatccagctggtgcagacctacaaccagctgttcgaggagaaccccatcaacgccagcggcgtggacgccaaggccatcctgagcgcccggctgagcaagagccggcggctggagaacctgatcgcccagctgcccggcgagaagaagaacggcctgttcggcaacctgatcgccctgagcctgggcctgacccccaacttcaagagcaacttcgacctggccgaggacgccaagctgcagctgagcaaggacacctacgacgacgacctggacaacctgctggcccagatcggcgaccagtacgccgacctgttcctggccgccaagaacctgagcgacgccatcctgctgagcgacatcctgcgggtgaacaccgagatcaccaaggcccccctgagcgccagcatgatcaagcggtacgacgagcaccaccaggacctgaccctgctgaaggccctggtgcggcagcagctgcccgagaagtacaaggagatcttcttcgaccagagcaagaacggctacgccggctacatcgacggcggcgccagccaggaggagttctacaagttcatcaagcccatcctggagaagatggacggcaccgaggagctgctggtgaagctgaaccgggaggacctgctgcggaagcagcggaccttcgacaacggcagcatcccccaccagatccacctgggcgagctgcacgccatcctgcggcggcaggaggacttctaccccttcctgaaggacaaccgggagaagatcgagaagatcctgaccttccggatcccctactacgtgggccccctggcccggggcaacagccggttcgcctggatgacccggaaatccgaggagaccatcaccccctggaacttcgaggaggtggtggacaagggcgccagcgcccagagcttcatcgagcggatgaccaacttcgacaagaacctgcccaacgagaaggtgctgcccaagcacagcctgctgtacgagtacttcaccgtgtacaacgagctgaccaaggtgaagtacgtgaccgagggcatgcggaagcccgccttcctgagcggcgagcagaagaaggccatcgtggacctgctgttcaagaccaaccggaaggtgaccgtgaagcagctgaaggaggactacttcaagaagatcgagtgcttcgacagcgtggagatcagcggcgtggaggaccggttcaacgccagcctgggcacctaccacgacctgctgaagatcatcaaggacaaggacttcctggacaacgaggagaacgaggacatcctggaggacatcgtgctgaccctgaccctgttcgaggaccgggagatgatcgaggagcggctgaaaacctacgcccacctgttcgacgacaaggtgatgaagcagctgaagcggcggcggtacaccggctggggccggctgagccggaagctgatcaacggcatccgggacaagcagagcggcaagaccatcctggacttcctgaaatccgacggcttcgccaaccggaacttcatgcagctgatccacgacgacagcctgaccttcaaggaggacatccagaaggcccaggtgagcggccagggcgacagcctgcacgagcacatcgccaacctggccggcagccccgccatcaagaagggcatcctgcagaccgtgaaggtggtggacgagctggtgaaggtgatgggccggcacaagcccgagaacatcgtgatcgagatggcccgggagaaccagaccacccagaagggccagaagaacagccgggagcggatgaagcggatcgaggagggcatcaaggagctgggcagccagatcctgaaggagcaccccgtggagaacacccagctgcagaacgagaagctgtacctgtactacctgcagaacggccgggacatgtacgtggaccaggagctggacatcaaccggctgagcgactacgacgtggccgccatcgtgccccagagcttcctgaaggacgacagcatcgacaacaaggtgctgacccggagcgacaaggcccggggcaagagcgacaacgtgcccagcgaggaggtggtgaagaagatgaagaactactggcggcagctgctgaacgccaagctgatcacccagcggaagttcgacaacctgaccaaggccgagcggggcggcctgagcgagctggacaaggccggcttcatcaagcggcagctggtggagacccggcagatcaccaagcacgtggcccagatcctggacagccggatgaacaccaagtacgacgagaacgacaagctgatccgggaggtgaaggtgatcaccctgaaatccaagctggtgagcgacttccggaaggacttccagttctacaaggtgcgggagatcaacaactaccaccacgcccacgacgcctacctgaacgccgtggtgggcaccgccctgatcaagaagtaccccaagctggagagcgagttcgtgtacggcgactacaaggtgtacgacgtgcggaagatgatcgccaagagcgagcaggagatcggcaaggccaccgccaagtacttcttctacagcaacatcatgaacttcttcaagaccgagatcaccctggccaacggcgagatccggaagcggcccctgatcgagaccaacggcgagaccggcgagatcgtgtgggacaagggccgggacttcgccaccgtgcggaaggtgctgagcatgccccaggtgaacatcgtgaagaaaaccgaggtgcagaccggcggcttcagcaaggagagcatcctgcccaagcggaacagcgacaagctgatcgcccggaagaaggactgggaccccaagaagtacggcggcttcgacagccccaccgtggcctacagcgtgctggtggtggccaaggtggagaagggcaagagcaagaagctgaaatccgtgaaggagctgctgggcatcaccatcatggagcggagcagcttcgagaagaaccccatcgacttcctggaggccaagggctacaaggaggtgaagaaggacctgatcatcaagctgcccaagtacagcctgttcgagctggagaacggccggaagcggatgctggccagcgccggcgagctgcagaagggcaacgagctggccctgcccagcaagtacgtgaacttcctgtacctggccagccactacgagaagctgaagggcagccccgaggacaacgagcagaagcagctgttcgtggagcagcacaagcactacctggacgagatcatcgagcagatcagcgagttcagcaagcgggtgatcctggccgacgccaacctggacaaggtgctgagcgcctacaacaagcaccgggacaagcccatccgggagcaggccgagaacatcatccacctgttcaccctgaccaacctgggcgcccccgccgccttcaagtacttcgacaccaccatcgaccggaagcggtacaccagcaccaaggaggtgctggacgccaccctgatccaccagagcatcaccggcctgtacgagacccggatcgacctgagccagctgggcggcgacagcggcggcaagcggcccgccgccaccaagaaggccggccaggccaagaagaagaagggcagctacccctacgacgtgcccgactacgcctgagcggccgcttaattaagctgccttctgcggggcttgccttctggccatgcccttcttctctcccttgcacctgtacctcttggtctttgaataaagcctgagtaggaagtctagaaaaaaaaaaaaaaaaaaaaaaaaaaaaaaaaaaaaaaaaaaaaaaaaaaaaaaaaaaaaaaaaaaaaaaaaaaaaaaaa

SEQ ID NO: 27 - DNA, 5698 bp, Artificial Sequence
  Description of Artificial Sequence: Synthetic polynucleotide
aggaaataagagagaaaagaagagtaagaagaaatataagagccaccatggcccccaagaagaagcggaaggtgggcatccacggcgtgcccgccgccgacaagaagtacagcatcggcctggccatcggcaccaacagcgtgggctgggccgtgatcaccgacgagtacaaggtgcccagcaagaagttcaaggtgctgggcaacaccgaccggcacagcatcaagaagaacctgatcggcgccctgctgttcgacagcggcgagaccgccgaggccacccggctgaagcggaccgcccggcggcggtacacccggcggaagaaccggatctgctacctgcaggagatcttcagcaacgagatggccaaggtggacgacagcttcttccaccggctggaggagagcttcctggtggaggaggacaagaagcacgagcggcaccccatcttcggcaacatcgtggacgaggtggcctaccacgagaagtaccccaccatctaccacctgcggaagaagctggtggacagcaccgacaaggccgacctgcggctgatctacctggccctggcccacatgatcaagttccggggccacttcctgatcgagggcgacctgaaccccgacaacagcgacgtggacaagctgttcatccagctggtgcagacctacaaccagctgttcgaggagaaccccatcaacgccagcggcgtggacgccaaggccatcctgagcgcccggctgagcaagagccggcggctggagaacctgatcgcccagctgcccggcgagaagaagaacggcctgttcggcaacctgatcgccctgagcctgggcctgacccccaacttcaagagcaacttcgacctggccgaggacgccaagctgcagctgagcaaggacacctacgacgacgacctggacaacctgctggcccagatcggcgaccagtacgccgacctgttcctggccgccaagaacctgagcgacgccatcctgctgagcgacatcctgcgggtgaacaccgagatcaccaaggcccccctgagcgccagcatgatcaagcggtacgacgagcaccaccaggacctgaccctgctgaaggccctggtgcggcagcagctgcccgagaagtacaaggagatcttcttcgaccagagcaagaacggctacgccggctacatcgacggcggcgccagccaggaggagttctacaagttcatcaagcccatcctggagaagatggacggcaccgaggagctgctggtgaagctgaaccgggaggacctgctgcggaagcagcggaccttcgacaacggcagcatcccccaccagatccacctgggcgagctgcacgccatcctgcggcggcaggaggacttctaccccttcctgaaggacaaccgggagaagatcgagaagatcctgaccttccggatcccctactacgtgggccccctggcccggggcaacagccggttcgcctggatgacccggaaatccgaggagaccatcaccccctggaacttcgaggaggtggtggacaagggcgccagcgcccagagcttcatcgagcggatgaccaacttcgacaagaacctgcccaacgagaaggtgctgcccaagcacagcctgctgtacgagtacttcaccgtgtacaacgagctgaccaaggtgaagtacgtgaccgagggcatgcggaagcccgccttcctgagcggcgagcagaagaaggccatcgtggacctgctgttcaagaccaaccggaaggtgaccgtgaagcagctgaaggaggactacttcaagaagatcgagtgcttcgacagcgtggagatcagcggcgtggaggaccggttcaacgccagcctgggcacctaccacgacctgctgaagatcatcaaggacaaggacttcctggacaacgaggagaacgaggacatcctggaggacatcgtgctgaccctgaccctgttcgaggaccgggagatgatcgaggagcggctgaaaacctacgcccacctgttcgacgacaaggtgatgaagcagctgaagcggcggcggtacaccggctggggccggctgagccggaagctgatcaacggcatccgggacaagcagagcggcaagaccatcctggacttcctgaaatccgacggcttcgccaaccggaacttcatgcagctgatccacgacgacagcctgaccttcaaggaggacatccagaaggcccaggtgagcggccagggcgacagcctgcacgagcacatcgccaacctggccggcagccccgccatcaagaagggcatcctgcagaccgtgaaggtggtggacgagctggtgaaggtgatgggccggcacaagcccgagaacatcgtgatcgagatggcccgggagaaccagaccacccagaagggccagaagaacagccgggagcggatgaagcggatcgaggagggcatcaaggagctgggcagccagatcctgaaggagcaccccgtggagaacacccagctgcagaacgagaagctgtacctgtactacctgcagaacggccgggacatgtacgtggaccaggagctggacatcaaccggctgagcgactacgacgtggccgccatcgtgccccagagcttcctgaaggacgacagcatcgacaacaaggtgctgacccggagcgacaaggcccggggcaagagcgacaacgtgcccagcgaggaggtggtgaagaagatgaagaactactggcggcagctgctgaacgccaagctgatcacccagcggaagttcgacaacctgaccaaggccgagcggggcggcctgagcgagctggacaaggccggcttcatcaagcggcagctggtggagacccggcagatcaccaagcacgtggcccagatcctggacagccggatgaacaccaagtacgacgagaacgacaagctgatccgggaggtgaaggtgatcaccctgaaatccaagctggtgagcgacttccggaaggacttccagttctacaaggtgcgggagatcaacaactaccaccacgcccacgacgcctacctgaacgccgtggtgggcaccgccctgatcaagaagtaccccaagctggagagcgagttcgtgtacggcgactacaaggtgtacgacgtgcggaagatgatcgccaagagcgagcaggagatcggcaaggccaccgccaagtacttcttctacagcaacatcatgaacttcttcaagaccgagatcaccctggccaacggcgagatccggaagcggcccctgatcgagaccaacggcgagaccggcgagatcgtgtgggacaagggccgggacttcgccaccgtgcggaaggtgctgagcatgccccaggtgaacatcgtgaagaaaaccgaggtgcagaccggcggcttcagcaaggagagcatcctgcccaagcggaacagcgacaagctgatcgcccggaagaaggactgggaccccaagaagtacggcggcttcgacagccccaccgtggcctacagcgtgctggtggtggccaaggtggagaagggcaagagcaagaagctgaaatccgtgaaggagctgctgggcatcaccatcatggagcggagcagcttcgagaagaaccccatcgacttcctggaggccaagggctacaaggaggtgaagaaggacctgatcatcaagctgcccaagtacagcctgttcgagctggagaacggccggaagcggatgctggccagcgccggcgagctgcagaagggcaacgagctggccctgcccagcaagtacgtgaacttcctgtacctggccagccactacgagaagctgaagggcagccccgaggacaacgagcagaagcagctgttcgtggagcagcacaagcactacctggacgagatcatcgagcagatcagcgagttcagcaagcgggtgatcctggccgacgccaacctggacaaggtgctgagcgcctacaacaagcaccgggacaagcccatccgggagcaggccgagaacatcatccacctgttcaccctgaccaacctgggcgcccccgccgccttcaagtacttcgacaccaccatcgaccggaagcggtacaccagcaccaaggaggtgctggacgccaccctgatccaccagagcatcaccggcctgtacgagacccggatcgacctgagccagctgggcggcgacagcggcggcaagcggcccgccgccaccaagaaggccggccaggccaagaagaagaagtcgggcgggggtggctcagaggagcccgaggagcccgccgatagcggacaatctctggtgcccgtctacatctacagccccgaatatgtgagcatgtgtgattccctcgccaagatccctaagagagccagcatggtgcattctctgatcgaggcctacgctctgcataagcaaatgaggatcgtgaagcccaaggtcgccagcatggaagagatggccacctttcacaccgatgcctacctccaacatctccagaaggtgtcccaagagggcgacgacgaccaccccgactccattgagtacggactgggctatgattgccccgccaccgagggcatctttgactatgccgccgctatcggcggagctaccatcacagccgcccagtgtctgattgatggcatgtgcaaggtcgccatcaactggtccggaggctggcatcatgccaagaaggatgaggcctccggcttctgttatctgaatgacgccgtgctgggcattctgagactgaggaggaaattcgagaggattctgtacgtggatctggatctgcatcacggagatggagtcgaagatgccttcagcttcaccagcaaggtgatgacagtctctctgcacaagttctcccccggcttctttcccggaaccggcgacgtgtccgacgtgggactgggcaagggaaggtactacagcgtgaacgtgcccattcaagacggcatccaagacgagaagtactaccagatctgcgagtccgtgctcaaggaggtctaccaagccttcaatcctaaggctgtcgtgctccaactgggagctgataccattgctggcgatcccatgtgcagcttcaatatgacacccgtcggaatcggcaagtgcctcaagtacatcctccagtggcagctcgccaccctcattctcggaggaggcggatacaatctggctaataccgccagatgctggacctatctgaccggcgtgattctgggcaaaacactgagcagcgaaatccccgaccacgagtttttcaccgcttacggccccgactacgtgctggagatcacccccagctgcagacccgatagaaacgaaccccatagaatccagcaaattctgaactatatcaagggcaacctcaagcacgtcgtgggaggtggcggatcgggaaagcggcccgccgccaccaagaaggccggtcaggccaagaagaagaagggcagctacccctacgacgtgcccgactacgcctgagcggccgcttaattaagctgccttctgcggggcttgccttctggccatgcccttcttctctcccttgcacctgtacctcttggtctttgaataaagcctgagtaggaagtctagaaaaaaaaaaaaaaaaaaaaaaaaaaaaaaaaaaaaaaaaaaaaaaaaaaaaaaaaaaaaaaaaaaaaaaaaaaaaaaaa

SEQ ID NO: 28 - DNA, 7114 bp, Artificial Sequence
  Description of Artificial Sequence: Synthetic polynucleotide
aggaaataagagagaaaagaagagtaagaagaaatataagagccaccatggcccccaagaagaagcggaaggtgggcatccacggcgtgcccgccgccgacaagaagtacagcatcggcctggccatcggcaccaacagcgtgggctgggccgtgatcaccgacgagtacaaggtgcccagcaagaagttcaaggtgctgggcaacaccgaccggcacagcatcaagaagaacctgatcggcgccctgctgttcgacagcggcgagaccgccgaggccacccggctgaagcggaccgcccggcggcggtacacccggcggaagaaccggatctgctacctgcaggagatcttcagcaacgagatggccaaggtggacgacagcttcttccaccggctggaggagagcttcctggtggaggaggacaagaagcacgagcggcaccccatcttcggcaacatcgtggacgaggtggcctaccacgagaagtaccccaccatctaccacctgcggaagaagctggtggacagcaccgacaaggccgacctgcggctgatctacctggccctggcccacatgatcaagttccggggccacttcctgatcgagggcgacctgaaccccgacaacagcgacgtggacaagctgttcatccagctggtgcagacctacaaccagctgttcgaggagaaccccatcaacgccagcggcgtggacgccaaggccatcctgagcgcccggctgagcaagagccggcggctggagaacctgatcgcccagctgcccggcgagaagaagaacggcctgttcggcaacctgatcgccctgagcctgggcctgacccccaacttcaagagcaacttcgacctggccgaggacgccaagctgcagctgagcaaggacacctacgacgacgacctggacaacctgctggcccagatcggcgaccagtacgccgacctgttcctggccgccaagaacctgagcgacgccatcctgctgagcgacatcctgcgggtgaacaccgagatcaccaaggcccccctgagcgccagcatgatcaagcggtacgacgagcaccaccaggacctgaccctgctgaaggccctggtgcggcagcagctgcccgagaagtacaaggagatcttcttcgaccagagcaagaacggctacgccggctacatcgacggcggcgccagccaggaggagttctacaagttcatcaagcccatcctggagaagatggacggcaccgaggagctgctggtgaagctgaaccgggaggacctgctgcggaagcagcggaccttcgacaacggcagcatcccccaccagatccacctgggcgagctgcacgccatcctgcggcggcaggaggacttctaccccttcctgaaggacaaccgggagaagatcgagaagatcctgaccttccggatcccctactacgtgggccccctggcccggggcaacagccggttcgcctggatgacccggaaatccgaggagaccatcaccccctggaacttcgaggaggtggtggacaagggcgccagcgcccagagcttcatcgagcggatgaccaacttcgacaagaacctgcccaacgagaaggtgctgcccaagcacagcctgctgtacgagtacttcaccgtgtacaacgagctgaccaaggtgaagtacgtgaccgagggcatgcggaagcccgccttcctgagcggcgagcagaagaaggccatcgtggacctgctgttcaagaccaaccggaaggtgaccgtgaagcagctgaaggaggactacttcaagaagatcgagtgcttcgacagcgtggagatcagcggcgtggaggaccggttcaacgccagcctgggcacctaccacgacctgctgaagatcatcaaggacaaggacttcctggacaacgaggagaacgaggacatcctggaggacatcgtgctgaccctgaccctgttcgaggaccgggagatgatcgaggagcggctgaaaacctacgcccacctgttcgacgacaaggtgatgaagcagctgaagcggcggcggtacaccggctggggccggctgagccggaagctgatcaacggcatccgggacaagcagagcggcaagaccatcctggacttcctgaaatccgacggcttcgccaaccggaacttcatgcagctgatccacgacgacagcctgaccttcaaggaggacatccagaaggcccaggtgagcggccagggcgacagcctgcacgagcacatcgccaacctggccggcagccccgccatcaagaagggcatcctgcagaccgtgaaggtggtggacgagctggtgaaggtgatgggccggcacaagcccgagaacatcgtgatcgagatggcccgggagaaccagaccacccagaagggccagaagaacagccgggagcggatgaagcggatcgaggagggcatcaaggagctgggcagccagatcctgaaggagcaccccgtggagaacacccagctgcagaacgagaagctgtacctgtactacctgcagaacggccgggacatgtacgtggaccaggagctggacatcaaccggctgagcgactacgacgtggccgccatcgtgccccagagcttcctgaaggacgacagcatcgacaacaaggtgctgacccggagcgacaaggcccggggcaagagcgacaacgtgcccagcgaggaggtggtgaagaagatgaagaactactggcggcagctgctgaacgccaagctgatcacccagcggaagttcgacaacctgaccaaggccgagcggggcggcctgagcgagctggacaaggccggcttcatcaagcggcagctggtggagacccggcagatcaccaagcacgtggcccagatcctggacagccggatgaacaccaagtacgacgagaacgacaagctgatccgggaggtgaaggtgatcaccctgaaatccaagctggtgagcgacttccggaaggacttccagttctacaaggtgcgggagatcaacaactaccaccacgcccacgacgcctacctgaacgccgtggtgggcaccgccctgatcaagaagtaccccaagctggagagcgagttcgtgtacggcgactacaaggtgtacgacgtgcggaagatgatcgccaagagcgagcaggagatcggcaaggccaccgccaagtacttcttctacagcaacatcatgaacttcttcaagaccgagatcaccctggccaacggcgagatccggaagcggcccctgatcgagaccaacggcgagaccggcgagatcgtgtgggacaagggccgggacttcgccaccgtgcggaaggtgctgagcatgccccaggtgaacatcgtgaagaaaaccgaggtgcagaccggcggcttcagcaaggagagcatcctgcccaagcggaacagcgacaagctgatcgcccggaagaaggactgggaccccaagaagtacggcggcttcgacagccccaccgtggcctacagcgtgctggtggtggccaaggtggagaagggcaagagcaagaagctgaaatccgtgaaggagctgctgggcatcaccatcatggagcggagcagcttcgagaagaaccccatcgacttcctggaggccaagggctacaaggaggtgaagaaggacctgatcatcaagctgcccaagtacagcctgttcgagctggagaacggccggaagcggatgctggccagcgccggcgagctgcagaagggcaacgagctggccctgcccagcaagtacgtgaacttcctgtacctggccagccactacgagaagctgaagggcagccccgaggacaacgagcagaagcagctgttcgtggagcagcacaagcactacctggacgagatcatcgagcagatcagcgagttcagcaagcgggtgatcctggccgacgccaacctggacaaggtgctgagcgcctacaacaagcaccgggacaagcccatccgggagcaggccgagaacatcatccacctgttcaccctgaccaacctgggcgcccccgccgccttcaagtacttcgacaccaccatcgaccggaagcggtacaccagcaccaaggaggtgctggacgccaccctgatccaccagagcatcaccggcctgtacgagacccggatcgacctgagccagctgggcggcgacagcggcggcaagcggcccgccgccaccaagaaggccggccaggccaagaagaagaaggagagcggcggcggcagcctctccggaaagaaagccgccgctgccgctgccgccgctgctgctgccgctaccggcacagaagctggccccggaacagctggcggaagcgaaaacggaagcgaagtggctgcccagcccgccggactgtccggacccgccgaggtgggacccggcgctgtcggcgaaaggacccccagaaaaaaggagcctcctagagccagccctcccggcggactcgccgaacctcccggcagcgctggacctcaagccggacctacagtggtgcccggcagcgctacacctatggagaccggcatcgctgagacccccgagggaaggagaaccagcagaaggaagagagccaaggtggagtacagagagatggatgagtctctggctaacctcagcgaggacgagtactactccgaggaggaaaggaatgccaaggccgagaaggagaagaagctgccccctcctccccctcaagccccccccgaggaggagaacgagtccgagcccgaggaacccagcggagtggaaggagccgcctttcagtccagactgccccacgacagaatgacatcccaagaggccgcttgctttcccgacattatttccggccctcagcagacccagaaggtgtttctgttcattagaaatagaacactccagctgtggctcgacaaccccaagatccagctgaccttcgaggctaccctccaacagctggaggccccctacaatagcgataccgtgctggtgcacagagtgcacagctatctggagaggcacggcctcattaacttcggcatttacaagcggatcaagcccctgcccaccaagaaaacaggcaaggtgatcatcatcggcagcggcgtgagcggcctggccgccgcccggcagctgcagagcttcggcatggacgtgaccctgctggaggcccgggaccgggtgggcggccgggtggccaccttccggaagggcaactacgtggccgacctgggcgccatggtggtgaccggcctgggcggcaaccccatggccgtggtgagcaagcaggtgaacatggagctggccaagatcaagcagaagtgccccctgtacgaggccaacggccaggccgtgcccaaggagaaggacgagatggtggagcaggagttcaaccggctgctggaggccaccagctacctgagccaccagctggacttcaacgtgctgaacaacaagcacgtgagcctgggccaggccctggaggtggtgatccagctgcaggagaagcacgtgaaggacgagcagatcgagcactggaagaagatcgtgaaaacacaggaggagctgaaggagctgctgaacaagatggtgaacctgaaggagaagatcaaggagctgcaccagcagtacaaggaggccagcgaggtgaagcccccccgggacatcaccgccgagttcctggtcaaaagcaagcaccgggacctgaccgccctgtgcaaggagtacgacgagctggccgagacccagggcaagctggaggagaagctgcaggagctggaggccaacccccccagcgacgtgtacctgagcagccgggaccggcagatcctggactggcacttcgccaacctggagttcgccaacgccacccccctgagcaccctgagcctgaagcactgggaccaggacgacgacttcgagttcaccggcagccacctgaccgtgcggaacggctacagctgcgtgcccgtggccctggccgagggcctggacatcaagctgaacaccgccgtgcggcaggtgcggtacaccgccagcggctgcgaggtgatcgccgtgaacacccggagcaccagccagaccttcatctacaagtgcgacgccgtgctgtgcaccctgcccctgggcgtgctgaagcagcagccccccgccgtgcagttcgtgccccccctgcccgagtggaaaacaagcgccgtgcagcggatgggcttcggcaacctgaacaaggtggtgctgtgcttcgaccgggtgttctgggaccccagcgtgaacctgttcggccacgtgggcagcaccaccgccagccggggcgagctgttcctgttctggaacctgtacaaggcccccatcctgctggccctggtggccggcgaggccgccggcatcatggagaacatcagcgacgacgtgatcgtgggccggtgcctggccatcctgaagggcatcttcggcagcagcgccgtgccccagcccaaggagaccgtggtgagccggtggcgggccgacccctgggcccggggcagctacagctacgtggccgccggcagcagcggcaacgactacgacctgatggcccagcccatcacccccggccccagcatccccggcgccccccagcccatcccccggctgttcttcgccggcgagcacaccatccggaactaccccgccaccgtgcacggcgccctgctgagcggcctgcgggaggcaggacggatcgccgaccagttcctgggcgccatgtacaccctgccccggcaggccacccccggcgtgcccgcccagcagagccccagcatgagcggcggcaagcggcccgccgccaccaagaaggccggccaggccaagaagaagaagggcagctacccctacgacgtgcccgactacgcctgagcggccgcttaattaagctgccttctgcggggcttgccttctggccatgcccttcttctctcccttgcacctgtacctcttggtctttgaataaagcctgagtaggaagtctagaaaaaaaaaaaaaaaaaaaaaaaaaaaaaaaaaaaaaaaaaaaaaaaaaaaaaaaaaaaaaaaaaaaaaaaaaaaaaaaa

SEQ ID NO: 29 - DNA, 6775 bp, Artificial Sequence
  Description of Artificial Sequence: Synthetic polynucleotide
aggaaataagagagaaaagaagagtaagaagaaatataagagccaccatggcccccaagaagaagcggaaggtgggcggcagcggcggcagcggccagaccggcaagaagagcgagaagggccccgtgtgctggcggaagcgggtgaagagcgagtacatgcggctgcggcagctgaagcggttccggcgggccgacgaggtgaagagcatgttcagcagcaaccggcagaagatcctggagcggaccgagatcctgaaccaggagtggaagcagcggcgaatccagcccgtgcacatcctgaccagcgtgagcagcctgcggggcacccgggagtgcagcgtgaccagcgacctggacttccccacccaggtgatccccctaaagaccctgaacgccgtggccagcgtgcccatcatgtacagctggagccccctgcagcagaacttcatggtggaggacgagaccgtgctgcacaacatcccctacatgggcgacgaggtgctggaccaggacggcaccttcatcgaggagctgatcaagaactacgacggcaaggtgcacggcgaccgggagtgcggcttcatcaacgacgagatcttcgtggagctggtgaacgccctgggccagtacaacgacgacgacgacgacgacgacggcgacgaccccgaggagcgggaggagaagcagaaggacctggaggaccaccgggacgacaaggagagccggcccccccggaagttccccagcgacaagatcttcgaggccatcagcagcatgttccccgacaagggcaccgccgaggagctgaaggagaagtacaaggagctgaccgagcagcagctgcccggcgccctgccccccgagtgcacccccaacatcgacggccccaacgccaagagcgtgcagcgggagcagagcctgcacagcttccacaccctgttctgccggcggtgcttcaagtacgactgcttcctgcaccccttccacgccacccccaacacctacaagcggaagaacaccgagaccgccctggacaacaagccctgcggcccccagtgctaccagcacctggagggcgccaaggagttcgccgccgccctgaccgccgagcggatcaagaccccccccaagcggcccggcggccggcggcggggccggctgcccaacaacagcagccggcccagcacccccaccatcaacgtgctggagagcaaggacaccgacagcgaccgggaggccggcaccgagaccggcggcgagaacaacgacaaggaggaggaggagaagaaggacgagaccagcagcagcagcgaggccaacagccggtgccagacccccatcaagatgaagcccaacatcgagccccccgagaacgtggagtggagcggcgccgaggccagcatgttccgggtgctgatcggcacctactacgacaacttctgcgccatcgcccggctgatcggcaccaagacctgccggcaggtgtacgagttccgggtgaaggagagcagcatcatcgcccccgcccccgccgaggacgtggacacccccccccggaagaagaagcggaagcaccggctgtgggccgcccactgccggaagatccagctgaagaaggacggcagcagcaaccacgtgtacaactaccagccctgcgaccacccccggcagccctgcgacagcagctgcccctgcgtgatcgcccagaacttctgcgagaagttctgccagtgcagcagcgagtgccagaaccggttccccggctgccggtgcaaggcccagtgcaacaccaagcagtgcccctgctacctggccgtgcgggagtgcgaccccgacctgtgcctgacctgcggcgccgccgaccactgggacagcaagaacgtgagctgcaagaactgcagcatccagcggggcagcaagaagcacctgctgctggcccccagcgacgtggccggctggggcatcttcatcaaggaccccgtgcagaagaacgagttcatcagcgagtactgcggcgagatcatcagccaggacgaggccgaccggcggggcaaggtgtacgacaagtacatgtgcagcttcctgttcaacctgaacaacgacttcgtggtggacgccacccggaagggcaacaagatccggttcgccaaccacagcgtgaaccccaactgctacgccaaggtgatgatggtgaacggcgaccaccggatcggcatcttcgccaagcgggccatccagaccggcgaggagctgttcttcgactaccggtacagccaggccgacgccctgaagtacgtgggcatcgagcgggagatggagatccccagcaccggcggcagcggcggcagcggcggcagcggcggcagcggcggcagcggccgacccgacaagaagtacagcatcggcctggccatcggcaccaacagcgtgggctgggccgtgatcaccgacgagtacaaggtgcccagcaagaagttcaaggtgctgggcaacaccgaccggcacagcatcaagaagaacctgatcggcgccctgctgttcgacagcggcgagaccgccgaggccacccggctgaagcggaccgcccggcggcggtacacccggcggaagaaccggatctgctacctgcaggagatcttcagcaacgagatggccaaggtggacgacagcttcttccaccggctggaggagagcttcctggtggaggaggacaagaagcacgagcggcaccccatcttcggcaacatcgtggacgaggtggcctaccacgagaagtaccccaccatctaccacctgcggaagaagctggtggacagcaccgacaaggccgacctgcggctgatctacctggccctggcccacatgatcaagttccggggccacttcctgatcgagggcgacctgaaccccgacaacagcgacgtggacaagctgttcatccagctggtgcagacctacaaccagctgttcgaggagaaccccatcaacgccagcggcgtggacgccaaggccatcctgagcgcccggctgagcaagagccggcggctggagaacctgatcgcccagctgcccggcgagaagaagaacggcctgttcggcaacctgatcgccctgagcctgggcctgacccccaacttcaagagcaacttcgacctggccgaggacgccaagctgcagctgagcaaggacacctacgacgacgacctggacaacctgctggcccagatcggcgaccagtacgccgacctgttcctggccgccaagaacctgagcgacgccatcctgctgagcgacatcctgcgggtgaacaccgagatcaccaaggcccccctgagcgccagcatgatcaagcggtacgacgagcaccaccaggacctgaccctgctgaaggccctggtgcggcagcagctgcccgagaagtacaaggagatcttcttcgaccagagcaagaacggctacgccggctacatcgacggcggcgccagccaggaggagttctacaagttcatcaagcccatcctggagaagatggacggcaccgaggagctgctggtgaagctgaaccgggaggacctgctgcggaagcagcggaccttcgacaacggcagcatcccccaccagatccacctgggcgagctgcacgccatcctgcggcggcaggaggacttctaccccttcctgaaggacaaccgggagaagatcgagaagatcctgaccttccggatcccctactacgtgggccccctggcccggggcaacagccggttcgcctggatgacccggaaatccgaggagaccatcaccccctggaacttcgaggaggtggtggacaagggcgccagcgcccagagcttcatcgagcggatgaccaacttcgacaagaacctgcccaacgagaaggtgctgcccaagcacagcctgctgtacgagtacttcaccgtgtacaacgagctgaccaaggtgaagtacgtgaccgagggcatgcggaagcccgccttcctgagcggcgagcagaagaaggccatcgtggacctgctgttcaagaccaaccggaaggtgaccgtgaagcagctgaaggaggactacttcaagaagatcgagtgcttcgacagcgtggagatcagcggcgtggaggaccggttcaacgccagcctgggcacctaccacgacctgctgaagatcatcaaggacaaggacttcctggacaacgaggagaacgaggacatcctggaggacatcgtgctgaccctgaccctgttcgaggaccgggagatgatcgaggagcggctgaaaacctacgcccacctgttcgacgacaaggtgatgaagcagctgaagcggcggcggtacaccggctggggccggctgagccggaagctgatcaacggcatccgggacaagcagagcggcaagaccatcctggacttcctgaaatccgacggcttcgccaaccggaacttcatgcagctgatccacgacgacagcctgaccttcaaggaggacatccagaaggcccaggtgagcggccagggcgacagcctgcacgagcacatcgccaacctggccggcagccccgccatcaagaagggcatcctgcagaccgtgaaggtggtggacgagctggtgaaggtgatgggccggcacaagcccgagaacatcgtgatcgagatggcccgggagaaccagaccacccagaagggccagaagaacagccgggagcggatgaagcggatcgaggagggcatcaaggagctgggcagccagatcctgaaggagcaccccgtggagaacacccagctgcagaacgagaagctgtacctgtactacctgcagaacggccgggacatgtacgtggaccaggagctggacatcaaccggctgagcgactacgacgtggccgccatcgtgccccagagcttcctgaaggacgacagcatcgacaacaaggtgctgacccggagcgacaaggcccggggcaagagcgacaacgtgcccagcgaggaggtggtgaagaagatgaagaactactggcggcagctgctgaacgccaagctgatcacccagcggaagttcgacaacctgaccaaggccgagcggggcggcctgagcgagctggacaaggccggcttcatcaagcggcagctggtggagacccggcagatcaccaagcacgtggcccagatcctggacagccggatgaacaccaagtacgacgagaacgacaagctgatccgggaggtgaaggtgatcaccctgaaatccaagctggtgagcgacttccggaaggacttccagttctacaaggtgcgggagatcaacaactaccaccacgcccacgacgcctacctgaacgccgtggtgggcaccgccctgatcaagaagtaccccaagctggagagcgagttcgtgtacggcgactacaaggtgtacgacgtgcggaagatgatcgccaagagcgagcaggagatcggcaaggccaccgccaagtacttcttctacagcaacatcatgaacttcttcaagaccgagatcaccctggccaacggcgagatccggaagcggcccctgatcgagaccaacggcgagaccggcgagatcgtgtgggacaagggccgggacttcgccaccgtgcggaaggtgctgagcatgccccaggtgaacatcgtgaagaaaaccgaggtgcagaccggcggcttcagcaaggagagcatcctgcccaagcggaacagcgacaagctgatcgcccggaagaaggactgggaccccaagaagtacggcggcttcgacagccccaccgtggcctacagcgtgctggtggtggccaaggtggagaagggcaagagcaagaagctgaaatccgtgaaggagctgctgggcatcaccatcatggagcggagcagcttcgagaagaaccccatcgacttcctggaggccaagggctacaaggaggtgaagaaggacctgatcatcaagctgcccaagtacagcctgttcgagctggagaacggccggaagcggatgctggccagcgccggcgagctgcagaagggcaacgagctggccctgcccagcaagtacgtgaacttcctgtacctggccagccactacgagaagctgaagggcagccccgaggacaacgagcagaagcagctgttcgtggagcagcacaagcactacctggacgagatcatcgagcagatcagcgagttcagcaagcgggtgatcctggccgacgccaacctggacaaggtgctgagcgcctacaacaagcaccgggacaagcccatccgggagcaggccgagaacatcatccacctgttcaccctgaccaacctgggcgcccccgccgccttcaagtacttcgacaccaccatcgaccggaagcggtacaccagcaccaaggaggtgctggacgccaccctgatccaccagagcatcaccggcctgtacgagacccggatcgacctgagccagctgggcggcgacagcggcggcaagcggcccgccgccaccaagaaggccggccaggccaagaagaagaagggcagctacccctacgacgtgcccgactacgcctgagcggccgcttaattaagctgccttctgcggggcttgccttctggccatgcccttcttctctcccttgcacctgtacctcttggtctttgaataaagcctgagtaggaagtctagaaaaaaaaaaaaaaaaaaaaaaaaaaaaaaaaaaaaaaaaaaaaaaaaaaaaaaaaaaaaaaaaaaaaaaaaaaaaaaaa

SEQ ID NO: 30 - DNA, 7147 bp, Artificial Sequence
  Description of Artificial Sequence: Synthetic polynucleotide
aggaaataagagagaaaagaagagtaagaagaaatataagagccaccatggcccccaagaagaagcggaaggtgggcggcagcggcggcagcggccagaccggcaagaagagcgagaagggccccgtgtgctggcggaagcgggtgaagagcgagtacatgcggctgcggcagctgaagcggttccggcgggccgacgaggtgaagagcatgttcagcagcaaccggcagaagatcctggagcggaccgagatcctgaaccaggagtggaagcagcggcgaatccagcccgtgcacatcctgaccagcgtgagcagcctgcggggcacccgggagtgcagcgtgaccagcgacctggacttccccacccaggtgatccccctaaagaccctgaacgccgtggccagcgtgcccatcatgtacagctggagccccctgcagcagaacttcatggtggaggacgagaccgtgctgcacaacatcccctacatgggcgacgaggtgctggaccaggacggcaccttcatcgaggagctgatcaagaactacgacggcaaggtgcacggcgaccgggagtgcggcttcatcaacgacgagatcttcgtggagctggtgaacgccctgggccagtacaacgacgacgacgacgacgacgacggcgacgaccccgaggagcgggaggagaagcagaaggacctggaggaccaccgggacgacaaggagagccggcccccccggaagttccccagcgacaagatcttcgaggccatcagcagcatgttccccgacaagggcaccgccgaggagctgaaggagaagtacaaggagctgaccgagcagcagctgcccggcgccctgccccccgagtgcacccccaacatcgacggccccaacgccaagagcgtgcagcgggagcagagcctgcacagcttccacaccctgttctgccggcggtgcttcaagtacgactgcttcctgcaccccttccacgccacccccaacacctacaagcggaagaacaccgagaccgccctggacaacaagccctgcggcccccagtgctaccagcacctggagggcgccaaggagttcgccgccgccctgaccgccgagcggatcaagaccccccccaagcggcccggcggccggcggcggggccggctgcccaacaacagcagccggcccagcacccccaccatcaacgtgctggagagcaaggacaccgacagcgaccgggaggccggcaccgagaccggcggcgagaacaacgacaaggaggaggaggagaagaaggacgagaccagcagcagcagcgaggccaacagccggtgccagacccccatcaagatgaagcccaacatcgagccccccgagaacgtggagtggagcggcgccgaggccagcatgttccgggtgctgatcggcacctactacgacaacttctgcgccatcgcccggctgatcggcaccaagacctgccggcaggtgtacgagttccgggtgaaggagagcagcatcatcgcccccgcccccgccgaggacgtggacacccccccccggaagaagaagcggaagcaccggctgtgggccgcccactgccggaagatccagctgaagaaggacggcagcagcaaccacgtgtacaactaccagccctgcgaccacccccggcagccctgcgacagcagctgcccctgcgtgatcgcccagaacttctgcgagaagttctgccagtgcagcagcgagtgccagaaccggttccccggctgccggtgcaaggcccagtgcaacaccaagcagtgcccctgctacctggccgtgcgggagtgcgaccccgacctgtgcctgacctgcggcgccgccgaccactgggacagcaagaacgtgagctgcaagaactgcagcatccagcggggcagcaagaagcacctgctgctggcccccagcgacgtggccggctggggcatcttcatcaaggaccccgtgcagaagaacgagttcatcagcgagtactgcggcgagatcatcagccaggacgaggccgaccggcggggcaaggtgtacgacaagtacatgtgcagcttcctgttcaacctgaacaacgacttcgtggtggacgccacccggaagggcaacaagatccggttcgccaaccacagcgtgaaccccaactgctacgccaaggtgatgatggtgaacggcgaccaccggatcggcatcttcgccaagcgggccatccagaccggcgaggagctgttcttcgactaccggtacagccaggccgacgccctgaagtacgtgggcatcgagcgggagatggagatccccagcaccggcggcagcggcggcagcggcggcagcggcggcagcggcggcagcggccgacccgacaagaagtacagcatcggcctggccatcggcaccaacagcgtgggctgggccgtgatcaccgacgagtacaaggtgcccagcaagaagttcaaggtgctgggcaacaccgaccggcacagcatcaagaagaacctgatcggcgccctgctgttcgacagcggcgagaccgccgaggccacccggctgaagcggaccgcccggcggcggtacacccggcggaagaaccggatctgctacctgcaggagatcttcagcaacgagatggccaaggtggacgacagcttcttccaccggctggaggagagcttcctggtggaggaggacaagaagcacgagcggcaccccatcttcggcaacatcgtggacgaggtggcctaccacgagaagtaccccaccatctaccacctgcggaagaagctggtggacagcaccgacaaggccgacctgcggctgatctacctggccctggcccacatgatcaagttccggggccacttcctgatcgagggcgacctgaaccccgacaacagcgacgtggacaagctgttcatccagctggtgcagacctacaaccagctgttcgaggagaaccccatcaacgccagcggcgtggacgccaaggccatcctgagcgcccggctgagcaagagccggcggctggagaacctgatcgcccagctgcccggcgagaagaagaacggcctgttcggcaacctgatcgccctgagcctgggcctgacccccaacttcaagagcaacttcgacctggccgaggacgccaagctgcagctgagcaaggacacctacgacgacgacctggacaacctgctggcccagatcggcgaccagtacgccgacctgttcctggccgccaagaacctgagcgacgccatcctgctgagcgacatcctgcgggtgaacaccgagatcaccaaggcccccctgagcgccagcatgatcaagcggtacgacgagcaccaccaggacctgaccctgctgaaggccctggtgcggcagcagctgcccgagaagtacaaggagatcttcttcgaccagagcaagaacggctacgccggctacatcgacggcggcgccagccaggaggagttctacaagttcatcaagcccatcctggagaagatggacggcaccgaggagctgctggtgaagctgaaccgggaggacctgctgcggaagcagcggaccttcgacaacggcagcatcccccaccagatccacctgggcgagctgcacgccatcctgcggcggcaggaggacttctaccccttcctgaaggacaaccgggagaagatcgagaagatcctgaccttccggatcccctactacgtgggccccctggcccggggcaacagccggttcgcctggatgacccggaaatccgaggagaccatcaccccctggaacttcgaggaggtggtggacaagggcgccagcgcccagagcttcatcgagcggatgaccaacttcgacaagaacctgcccaacgagaaggtgctgcccaagcacagcctgctgtacgagtacttcaccgtgtacaacgagctgaccaaggtgaagtacgtgaccgagggcatgcggaagcccgccttcctgagcggcgagcagaagaaggccatcgtggacctgctgttcaagaccaaccggaaggtgaccgtgaagcagctgaaggaggactacttcaagaagatcgagtgcttcgacagcgtggagatcagcggcgtggaggaccggttcaacgccagcctgggcacctaccacgacctgctgaagatcatcaaggacaaggacttcctggacaacgaggagaacgaggacatcctggaggacatcgtgctgaccctgaccctgttcgaggaccgggagatgatcgaggagcggctgaaaacctacgcccacctgttcgacgacaaggtgatgaagcagctgaagcggcggcggtacaccggctggggccggctgagccggaagctgatcaacggcatccgggacaagcagagcggcaagaccatcctggacttcctgaaatccgacggcttcgccaaccggaacttcatgcagctgatccacgacgacagcctgaccttcaaggaggacatccagaaggcccaggtgagcggccagggcgacagcctgcacgagcacatcgccaacctggccggcagccccgccatcaagaagggcatcctgcagaccgtgaaggtggtggacgagctggtgaaggtgatgggccggcacaagcccgagaacatcgtgatcgagatggcccgggagaaccagaccacccagaagggccagaagaacagccgggagcggatgaagcggatcgaggagggcatcaaggagctgggcagccagatcctgaaggagcaccccgtggagaacacccagctgcagaacgagaagctgtacctgtactacctgcagaacggccgggacatgtacgtggaccaggagctggacatcaaccggctgagcgactacgacgtggccgccatcgtgccccagagcttcctgaaggacgacagcatcgacaacaaggtgctgacccggagcgacaaggcccggggcaagagcgacaacgtgcccagcgaggaggtggtgaagaagatgaagaactactggcggcagctgctgaacgccaagctgatcacccagcggaagttcgacaacctgaccaaggccgagcggggcggcctgagcgagctggacaaggccggcttcatcaagcggcagctggtggagacccggcagatcaccaagcacgtggcccagatcctggacagccggatgaacaccaagtacgacgagaacgacaagctgatccgggaggtgaaggtgatcaccctgaaatccaagctggtgagcgacttccggaaggacttccagttctacaaggtgcgggagatcaacaactaccaccacgcccacgacgcctacctgaacgccgtggtgggcaccgccctgatcaagaagtaccccaagctggagagcgagttcgtgtacggcgactacaaggtgtacgacgtgcggaagatgatcgccaagagcgagcaggagatcggcaaggccaccgccaagtacttcttctacagcaacatcatgaacttcttcaagaccgagatcaccctggccaacggcgagatccggaagcggcccctgatcgagaccaacggcgagaccggcgagatcgtgtgggacaagggccgggacttcgccaccgtgcggaaggtgctgagcatgccccaggtgaacatcgtgaagaaaaccgaggtgcagaccggcggcttcagcaaggagagcatcctgcccaagcggaacagcgacaagctgatcgcccggaagaaggactgggaccccaagaagtacggcggcttcgacagccccaccgtggcctacagcgtgctggtggtggccaaggtggagaagggcaagagcaagaagctgaaatccgtgaaggagctgctgggcatcaccatcatggagcggagcagcttcgagaagaaccccatcgacttcctggaggccaagggctacaaggaggtgaagaaggacctgatcatcaagctgcccaagtacagcctgttcgagctggagaacggccggaagcggatgctggccagcgccggcgagctgcagaagggcaacgagctggccctgcccagcaagtacgtgaacttcctgtacctggccagccactacgagaagctgaagggcagccccgaggacaacgagcagaagcagctgttcgtggagcagcacaagcactacctggacgagatcatcgagcagatcagcgagttcagcaagcgggtgatcctggccgacgccaacctggacaaggtgctgagcgcctacaacaagcaccgggacaagcccatccgggagcaggccgagaacatcatccacctgttcaccctgaccaacctgggcgcccccgccgccttcaagtacttcgacaccaccatcgaccggaagcggtacaccagcaccaaggaggtgctggacgccaccctgatccaccagagcatcaccggcctgtacgagacccggatcgacctgagccagctgggcggcgacagcggcggcaagcggcccgccgccaccaagaaggccggccaggccaagaagaagaagtcgggcgggggtggctcagacgctaagtctctgaccgcttggagcagaacactggtcaccttcaaggacgtgttcgtcgacttcacaagagaggagtggaaactgctggacaccgcccagcagatcctctatagaaacgtcatgctggagaactacaagaatctggtgtctctgggctaccagctgaccaagcccgacgtgattctgaggctggagaagggcgaggagccttggctggtggagagagagatccaccaagaaacccaccccgacagcgaaaccgccttcgagatcaagagcagcgtgggaggtggcggatcgggaaagcggcccgccgccaccaagaaggccggtcaggccaagaagaagaagggcagctacccctacgacgtgcccgactacgcctgagcggccgcttaattaagctgccttctgcggggcttgccttctggccatgcccttcttctctcccttgcacctgtacctcttggtctttgaataaagcctgagtaggaagtctagaaaaaaaaaaaaaaaaaaaaaaaaaaaaaaaaaaaaaaaaaaaaaaaaaaaaaaaaaaaaaaaaaaaaaaaaaaaaaaaa

SEQ ID NO: 31 - DNA, 6040 bp, Artificial Sequence
  Description of Artificial Sequence: Synthetic polynucleotide
aggaaataagagagaaaagaagagtaagaagaaatataagagccaccatggcccccaagaagaagcggaaggtgggcatccacggcgtgcccgccgcctcgggcgggggtggctcaggaagcgccgctatcgccgaagtgctgctgaatgccagatgcgatctgcatgccgtgaactaccacggcgacacccctctgcatatcgccgctagagagagctaccatgactgtgtgctgctgtttctgagcagaggcgccaatcccgagctcagaaacaaagagggcgacaccgcttgggatctgacacccgagagatccgacgtgtggttcgctctgcaactgaatagaaaactgagactgggcgtcggcaatagggccattagaaccgagaagatcatctgtagggacgtggctaggggctacgagaacgtgcccatcccttgtgtgaacggagtggatggagagccttgccccgaggattacaaatacatcagcgagaactgcgaaacctccaccatgaatatcgatagaaacattacacacctccagcactgtacatgcgtggacgattgcagcagcagcaactgtctgtgcggccaactgagcatcagatgctggtacgacaaggatggcagactgctgcaagagttcaacaagatcgaaccccctctgatcttcgagtgtaaccaagcttgcagctgttggaggaactgcaagaatagggtcgtgcagtccggaatcaaggtgagactgcagctgtatagaacagctaagatgggatggggagtcagagctctgcagaccatcccccaaggcacattcatctgtgagtacgtcggcgaactcatcagcgacgctgaggccgatgtgagggaggacgacagctatctcttcgacctcgacaacaaggacggcgaggtgtactgcatcgacgctagatattacggcaacatcagcagattcatcaaccacctctgcgaccccaatatcatccccgtgagagtgttcatgctccatcaagatctgagattccctaggatcgccttcttcagctctagagacattagaaccggcgaggagctgggattcgactacggcgacaggttctgggacatcaagagcaagtacttcacatgccaatgcggcagcgagaaatgcaagcatagcgccgaggccattgctctggagcagtctagactggctaggctggaccctcaccccgagctgctgcccgaactgggatctctgcctcccgtgaataccggaggtggcggatcgggagacaagaagtacagcatcggcctggccatcggcaccaacagcgtgggctgggccgtgatcaccgacgagtacaaggtgcccagcaagaagttcaaggtgctgggcaacaccgaccggcacagcatcaagaagaacctgatcggcgccctgctgttcgacagcggcgagaccgccgaggccacccggctgaagcggaccgcccggcggcggtacacccggcggaagaaccggatctgctacctgcaggagatcttcagcaacgagatggccaaggtggacgacagcttcttccaccggctggaggagagcttcctggtggaggaggacaagaagcacgagcggcaccccatcttcggcaacatcgtggacgaggtggcctaccacgagaagtaccccaccatctaccacctgcggaagaagctggtggacagcaccgacaaggccgacctgcggctgatctacctggccctggcccacatgatcaagttccggggccacttcctgatcgagggcgacctgaaccccgacaacagcgacgtggacaagctgttcatccagctggtgcagacctacaaccagctgttcgaggagaaccccatcaacgccagcggcgtggacgccaaggccatcctgagcgcccggctgagcaagagccggcggctggagaacctgatcgcccagctgcccggcgagaagaagaacggcctgttcggcaacctgatcgccctgagcctgggcctgacccccaacttcaagagcaacttcgacctggccgaggacgccaagctgcagctgagcaaggacacctacgacgacgacctggacaacctgctggcccagatcggcgaccagtacgccgacctgttcctggccgccaagaacctgagcgacgccatcctgctgagcgacatcctgcgggtgaacaccgagatcaccaaggcccccctgagcgccagcatgatcaagcggtacgacgagcaccaccaggacctgaccctgctgaaggccctggtgcggcagcagctgcccgagaagtacaaggagatcttcttcgaccagagcaagaacggctacgccggctacatcgacggcggcgccagccaggaggagttctacaagttcatcaagcccatcctggagaagatggacggcaccgaggagctgctggtgaagctgaaccgggaggacctgctgcggaagcagcggaccttcgacaacggcagcatcccccaccagatccacctgggcgagctgcacgccatcctgcggcggcaggaggacttctaccccttcctgaaggacaaccgggagaagatcgagaagatcctgaccttccggatcccctactacgtgggccccctggcccggggcaacagccggttcgcctggatgacccggaaatccgaggagaccatcaccccctggaacttcgaggaggtggtggacaagggcgccagcgcccagagcttcatcgagcggatgaccaacttcgacaagaacctgcccaacgagaaggtgctgcccaagcacagcctgctgtacgagtacttcaccgtgtacaacgagctgaccaaggtgaagtacgtgaccgagggcatgcggaagcccgccttcctgagcggcgagcagaagaaggccatcgtggacctgctgttcaagaccaaccggaaggtgaccgtgaagcagctgaaggaggactacttcaagaagatcgagtgcttcgacagcgtggagatcagcggcgtggaggaccggttcaacgccagcctgggcacctaccacgacctgctgaagatcatcaaggacaaggacttcctggacaacgaggagaacgaggacatcctggaggacatcgtgctgaccctgaccctgttcgaggaccgggagatgatcgaggagcggctgaaaacctacgcccacctgttcgacgacaaggtgatgaagcagctgaagcggcggcggtacaccggctggggccggctgagccggaagctgatcaacggcatccgggacaagcagagcggcaagaccatcctggacttcctgaaatccgacggcttcgccaaccggaacttcatgcagctgatccacgacgacagcctgaccttcaaggaggacatccagaaggcccaggtgagcggccagggcgacagcctgcacgagcacatcgccaacctggccggcagccccgccatcaagaagggcatcctgcagaccgtgaaggtggtggacgagctggtgaaggtgatgggccggcacaagcccgagaacatcgtgatcgagatggcccgggagaaccagaccacccagaagggccagaagaacagccgggagcggatgaagcggatcgaggagggcatcaaggagctgggcagccagatcctgaaggagcaccccgtggagaacacccagctgcagaacgagaagctgtacctgtactacctgcagaacggccgggacatgtacgtggaccaggagctggacatcaaccggctgagcgactacgacgtggccgccatcgtgccccagagcttcctgaaggacgacagcatcgacaacaaggtgctgacccggagcgacaaggcccggggcaagagcgacaacgtgcccagcgaggaggtggtgaagaagatgaagaactactggcggcagctgctgaacgccaagctgatcacccagcggaagttcgacaacctgaccaaggccgagcggggcggcctgagcgagctggacaaggccggcttcatcaagcggcagctggtggagacccggcagatcaccaagcacgtggcccagatcctggacagccggatgaacaccaagtacgacgagaacgacaagctgatccgggaggtgaaggtgatcaccctgaaatccaagctggtgagcgacttccggaaggacttccagttctacaaggtgcgggagatcaacaactaccaccacgcccacgacgcctacctgaacgccgtggtgggcaccgccctgatcaagaagtaccccaagctggagagcgagttcgtgtacggcgactacaaggtgtacgacgtgcggaagatgatcgccaagagcgagcaggagatcggcaaggccaccgccaagtacttcttctacagcaacatcatgaacttcttcaagaccgagatcaccctggccaacggcgagatccggaagcggcccctgatcgagaccaacggcgagaccggcgagatcgtgtgggacaagggccgggacttcgccaccgtgcggaaggtgctgagcatgccccaggtgaacatcgtgaagaaaaccgaggtgcagaccggcggcttcagcaaggagagcatcctgcccaagcggaacagcgacaagctgatcgcccggaagaaggactgggaccccaagaagtacggcggcttcgacagccccaccgtggcctacagcgtgctggtggtggccaaggtggagaagggcaagagcaagaagctgaaatccgtgaaggagctgctgggcatcaccatcatggagcggagcagcttcgagaagaaccccatcgacttcctggaggccaagggctacaaggaggtgaagaaggacctgatcatcaagctgcccaagtacagcctgttcgagctggagaacggccggaagcggatgctggccagcgccggcgagctgcagaagggcaacgagctggccctgcccagcaagtacgtgaacttcctgtacctggccagccactacgagaagctgaagggcagccccgaggacaacgagcagaagcagctgttcgtggagcagcacaagcactacctggacgagatcatcgagcagatcagcgagttcagcaagcgggtgatcctggccgacgccaacctggacaaggtgctgagcgcctacaacaagcaccgggacaagcccatccgggagcaggccgagaacatcatccacctgttcaccctgaccaacctgggcgcccccgccgccttcaagtacttcgacaccaccatcgaccggaagcggtacaccagcaccaaggaggtgctggacgccaccctgatccaccagagcatcaccggcctgtacgagacccggatcgacctgagccagctgggcggcgacagcggcggcaagcggcccgccgccaccaagaaggccggccaggccaagaagaagaagtcgggcgggggtggctcagacgctaagtctctgaccgcttggagcagaacactggtcaccttcaaggacgtgttcgtcgacttcacaagagaggagtggaaactgctggacaccgcccagcagatcctctatagaaacgtcatgctggagaactacaagaatctggtgtctctgggctaccagctgaccaagcccgacgtgattctgaggctggagaagggcgaggagccttggctggtggagagagagatccaccaagaaacccaccccgacagcgaaaccgccttcgagatcaagagcagcgtgggaggtggcggatcgggaaagcggcccgccgccaccaagaaggccggtcaggccaagaagaagaagggcagctacccctacgacgtgcccgactacgcctgagcggccgcttaattaagctgccttctgcggggcttgccttctggccatgcccttcttctctcccttgcacctgtacctcttggtctttgaataaagcctgagtaggaagtctagaaaaaaaaaaaaaaaaaaaaaaaaaaaaaaaaaaaaaaaaaaaaaaaaaaaaaaaaaaaaaaaaaaaaaaaaaaaaaaaa

SEQ ID NO: 32 - DNA, 4870 bp, Artificial Sequence
  Description of Artificial Sequence: Synthetic polynucleotide
aggaaataagagagaaaagaagagtaagaagaaatataagagccaccatggcccccaagaagaagcggaaggtgggcatccacggcgtgcccgccgcctcgggcgggggtggctcaagcagaaggaagcagagcaaccccagacaaatcaagagatctctgggcgacatggaggccagagaggaagtgcagctggtgggcgccagccacatggagcagaaggctacagcccccgaggcccccagccccggaggtggcggatcgggagacaagaagtacagcatcggcctggccatcggcaccaacagcgtgggctgggccgtgatcaccgacgagtacaaggtgcccagcaagaagttcaaggtgctgggcaacaccgaccggcacagcatcaagaagaacctgatcggcgccctgctgttcgacagcggcgagaccgccgaggccacccggctgaagcggaccgcccggcggcggtacacccggcggaagaaccggatctgctacctgcaggagatcttcagcaacgagatggccaaggtggacgacagcttcttccaccggctggaggagagcttcctggtggaggaggacaagaagcacgagcggcaccccatcttcggcaacatcgtggacgaggtggcctaccacgagaagtaccccaccatctaccacctgcggaagaagctggtggacagcaccgacaaggccgacctgcggctgatctacctggccctggcccacatgatcaagttccggggccacttcctgatcgagggcgacctgaaccccgacaacagcgacgtggacaagctgttcatccagctggtgcagacctacaaccagctgttcgaggagaaccccatcaacgccagcggcgtggacgccaaggccatcctgagcgcccggctgagcaagagccggcggctggagaacctgatcgcccagctgcccggcgagaagaagaacggcctgttcggcaacctgatcgccctgagcctgggcctgacccccaacttcaagagcaacttcgacctggccgaggacgccaagctgcagctgagcaaggacacctacgacgacgacctggacaacctgctggcccagatcggcgaccagtacgccgacctgttcctggccgccaagaacctgagcgacgccatcctgctgagcgacatcctgcgggtgaacaccgagatcaccaaggcccccctgagcgccagcatgatcaagcggtacgacgagcaccaccaggacctgaccctgctgaaggccctggtgcggcagcagctgcccgagaagtacaaggagatcttcttcgaccagagcaagaacggctacgccggctacatcgacggcggcgccagccaggaggagttctacaagttcatcaagcccatcctggagaagatggacggcaccgaggagctgctggtgaagctgaaccgggaggacctgctgcggaagcagcggaccttcgacaacggcagcatcccccaccagatccacctgggcgagctgcacgccatcctgcggcggcaggaggacttctaccccttcctgaaggacaaccgggagaagatcgagaagatcctgaccttccggatcccctactacgtgggccccctggcccggggcaacagccggttcgcctggatgacccggaaatccgaggagaccatcaccccctggaacttcgaggaggtggtggacaagggcgccagcgcccagagcttcatcgagcggatgaccaacttcgacaagaacctgcccaacgagaaggtgctgcccaagcacagcctgctgtacgagtacttcaccgtgtacaacgagctgaccaaggtgaagtacgtgaccgagggcatgcggaagcccgccttcctgagcggcgagcagaagaaggccatcgtggacctgctgttcaagaccaaccggaaggtgaccgtgaagcagctgaaggaggactacttcaagaagatcgagtgcttcgacagcgtggagatcagcggcgtggaggaccggttcaacgccagcctgggcacctaccacgacctgctgaagatcatcaaggacaaggacttcctggacaacgaggagaacgaggacatcctggaggacatcgtgctgaccctgaccctgttcgaggaccgggagatgatcgaggagcggctgaaaacctacgcccacctgttcgacgacaaggtgatgaagcagctgaagcggcggcggtacaccggctggggccggctgagccggaagctgatcaacggcatccgggacaagcagagcggcaagaccatcctggacttcctgaaatccgacggcttcgccaaccggaacttcatgcagctgatccacgacgacagcctgaccttcaaggaggacatccagaaggcccaggtgagcggccagggcgacagcctgcacgagcacatcgccaacctggccggcagccccgccatcaagaagggcatcctgcagaccgtgaaggtggtggacgagctggtgaaggtgatgggccggcacaagcccgagaacatcgtgatcgagatggcccgggagaaccagaccacccagaagggccagaagaacagccgggagcggatgaagcggatcgaggagggcatcaaggagctgggcagccagatcctgaaggagcaccccgtggagaacacccagctgcagaacgagaagctgtacctgtactacctgcagaacggccgggacatgtacgtggaccaggagctggacatcaaccggctgagcgactacgacgtggccgccatcgtgccccagagcttcctgaaggacgacagcatcgacaacaaggtgctgacccggagcgacaaggcccggggcaagagcgacaacgtgcccagcgaggaggtggtgaagaagatgaagaactactggcggcagctgctgaacgccaagctgatcacccagcggaagttcgacaacctgaccaaggccgagcggggcggcctgagcgagctggacaaggccggcttcatcaagcggcagctggtggagacccggcagatcaccaagcacgtggcccagatcctggacagccggatgaacaccaagtacgacgagaacgacaagctgatccgggaggtgaaggtgatcaccctgaaatccaagctggtgagcgacttccggaaggacttccagttctacaaggtgcgggagatcaacaactaccaccacgcccacgacgcctacctgaacgccgtggtgggcaccgccctgatcaagaagtaccccaagctggagagcgagttcgtgtacggcgactacaaggtgtacgacgtgcggaagatgatcgccaagagcgagcaggagatcggcaaggccaccgccaagtacttcttctacagcaacatcatgaacttcttcaagaccgagatcaccctggccaacggcgagatccggaagcggcccctgatcgagaccaacggcgagaccggcgagatcgtgtgggacaagggccgggacttcgccaccgtgcggaaggtgctgagcatgccccaggtgaacatcgtgaagaaaaccgaggtgcagaccggcggcttcagcaaggagagcatcctgcccaagcggaacagcgacaagctgatcgcccggaagaaggactgggaccccaagaagtacggcggcttcgacagccccaccgtggcctacagcgtgctggtggtggccaaggtggagaagggcaagagcaagaagctgaaatccgtgaaggagctgctgggcatcaccatcatggagcggagcagcttcgagaagaaccccatcgacttcctggaggccaagggctacaaggaggtgaagaaggacctgatcatcaagctgcccaagtacagcctgttcgagctggagaacggccggaagcggatgctggccagcgccggcgagctgcagaagggcaacgagctggccctgcccagcaagtacgtgaacttcctgtacctggccagccactacgagaagctgaagggcagccccgaggacaacgagcagaagcagctgttcgtggagcagcacaagcactacctggacgagatcatcgagcagatcagcgagttcagcaagcgggtgatcctggccgacgccaacctggacaaggtgctgagcgcctacaacaagcaccgggacaagcccatccgggagcaggccgagaacatcatccacctgttcaccctgaccaacctgggcgcccccgccgccttcaagtacttcgacaccaccatcgaccggaagcggtacaccagcaccaaggaggtgctggacgccaccctgatccaccagagcatcaccggcctgtacgagacccggatcgacctgagccagctgggcggcgacagcggcggcaagcggcccgccgccaccaagaaggccggccaggccaagaagaagaagtcgggcgggggtggctcaagcagaaggaagcagagcaaccccagacaaatcaagagatctctgggcgacatggaggccagagaggaagtgcagctggtgggcgccagccacatggagcagaaggctacagcccccgaggcccccagccccggaggtggcggatcgggaaagcggcccgccgccaccaagaaggccggtcaggccaagaagaagaagggcagctacccctacgacgtgcccgactacgcctgagcggccgcttaattaagctgccttctgcggggcttgccttctggccatgcccttcttctctcccttgcacctgtacctcttggtctttgaataaagcctgagtaggaagtctagaaaaaaaaaaaaaaaaaaaaaaaaaaaaaaaaaaaaaaaaaaaaaaaaaaaaaaaaaaaaaaaaaaaaaaaaaaaaaaaa

SEQ ID NO: 33 - protein, 1820 aa, Artificial Sequence
  Description of Artificial Sequence: Synthetic polypeptide
MAPKKKRKVGIHGVPAADKKYSIGLAIGTNSVGWAVITDEYKVPSKKFKVLGNTDRHSIKKNLIGALLFDSGETAEATRLKRTARRRYTRRKNRICYLQEIFSNEMAKVDDSFFHRLEESFLVEEDKKHERHPIFGNIVDEVAYHEKYPTIYHLRKKLVDSTDKADLRLIYLALAHMIKFRGHFLIEGDLNPDNSDVDKLFIQLVQTYNQLFEENPINASGVDAKAILSARLSKSRRLENLIAQLPGEKKNGLFGNLIALSLGLTPNFKSNFDLAEDAKLQLSKDTYDDDLDNLLAQIGDQYADLFLAAKNLSDAILLSDILRVNTEITKAPLSASMIKRYDEHHQDLTLLKALVRQQLPEKYKEIFFDQSKNGYAGYIDGGASQEEFYKFIKPILEKMDGTEELLVKLNREDLLRKQRTFDNGSIPHQIHLGELHAILRRQEDFYPFLKDNREKIEKILTFRIPYYVGPLARGNSRFAWMTRKSEETITPWNFEEVVDKGASAQSFIERMTNFDKNLPNEKVLPKHSLLYEYFTVYNELTKVKYVTEGMRKPAFLSGEQKKAIVDLLFKTNRKVTVKQLKEDYFKKIECFDSVEISGVEDRFNASLGTYHDLLKIIKDKDFLDNEENEDILEDIVLTLTLFEDREMIEERLKTYAHLFDDKVMKQLKRRRYTGWGRLSRKLINGIRDKQSGKTILDFLKSDGFANRNFMQLIHDDSLTFKEDIQKAQVSGQGDSLHEHIANLAGSPAIKKGILQTVKVVDELVKVMGRHKPENIVIEMARENQTTQKGQKNSRERMKRIEEGIKELGSQILKEHPVENTQLQNEKLYLYYLQNGRDMYVDQELDINRLSDYDVAAIVPQSFLKDDSIDNKVLTRSDKARGKSDNVPSEEVVKKMKNYWRQLLNAKLITQRKFDNLTKAERGGLSELDKAGFIKRQLVETRQITKHVAQILDSRMNTKYDENDKLIREVKVITLKSKLVSDFRKDFQFYKVREINNYHHAHDAYLNAVVGTALIKKYPKLESEFVYGDYKVYDVRKMIAKSEQEIGKATAKYFFYSNIMNFFKTEITLANGEIRKRPLIETNGETGEIVWDKGRDFATVRKVLSMPQVNIVKKTEVQTGGFSKESILPKRNSDKLIARKKDWDPKKYGGFDSPTVAYSVLVVAKVEKGKSKKLKSVKELLGITIMERSSFEKNPIDFLEAKGYKEVKKDLIIKLPKYSLFELENGRKRMLASAGELQKGNELALPSKYVNFLYLASHYEKLKGSPEDNEQKQLFVEQHKHYLDEIIEQISEFSKRVILADANLDKVLSAYNKHRDKPIREQAENIIHLFTLTNLGAPAAFKYFDTTIDRKRYTSTKEVLDATLIHQSITGLYETRIDLSQLGGDKRPAATKKAGQAKKKKARDSKVENKTKKLRVFEAFAGIGAQRKALEKVRKDEYEIVGLAEWYVPAIVMYQAIHNNFHTKLEYKSVSREEMIDYLENKTLSWNSKNPVSNGYWKRKKDDELKIIYNAIKLSEKEGNIFDIRDLYKRTLKNIDLLTYSFPCQDLSQQGIQKGMKRGSGTRSGLLWEIERALDSTEKNDLPKYLLMENVGALLHKKNEEELNQWKQKLESLGYQNSIEVLNAADFGSSQARRRVFMISTLNEFVELPKGDKKPKSIKKVLNKIVSEKDILNNLLKYNLTEFKKTKSNINKASLIGYSKFNSEGYVYDPEFTGPTLTASGANSRIKIKDGSNIRKMNSDETFLYIGFDSQDGKRVNEIEFLTENQKIFVCGNSISVEVLEAIIDKIGGPSSGGKRPAATKKAGQAKKKKGSYPYDVPDYA

SEQ ID NO: 34 - protein, 1922 aa, Artificial Sequence
  Description of Artificial Sequence: Synthetic polypeptide
MAPKKKRKVGIHGVPAADKKYSIGLAIGTNSVGWAVITDEYKVPSKKFKVLGNTDRHSIKKNLIGALLFDSGETAEATRLKRTARRRYTRRKNRICYLQEIFSNEMAKVDDSFFHRLEESFLVEEDKKHERHPIFGNIVDEVAYHEKYPTIYHLRKKLVDSTDKADLRLIYLALAHMIKFRGHFLIEGDLNPDNSDVDKLFIQLVQTYNQLFEENPINASGVDAKAILSARLSKSRRLENLIAQLPGEKKNGLFGNLIALSLGLTPNFKSNFDLAEDAKLQLSKDTYDDDLDNLLAQIGDQYADLFLAAKNLSDAILLSDILRVNTEITKAPLSASMIKRYDEHHQDLTLLKALVRQQLPEKYKEIFFDQSKNGYAGYIDGGASQEEFYKFIKPILEKMDGTEELLVKLNREDLLRKQRTFDNGSIPHQIHLGELHAILRRQEDFYPFLKDNREKIEKILTFRIPYYVGPLARGNSRFAWMTRKSEETITPWNFEEVVDKGASAQSFIERMTNFDKNLPNEKVLPKHSLLYEYFTVYNELTKVKYVTEGMRKPAFLSGEQKKAIVDLLFKTNRKVTVKQLKEDYFKKIECFDSVEISGVEDRFNASLGTYHDLLKIIKDKDFLDNEENEDILEDIVLTLTLFEDREMIEERLKTYAHLFDDKVMKQLKRRRYTGWGRLSRKLINGIRDKQSGKTILDFLKSDGFANRNFMQLIHDDSLTFKEDIQKAQVSGQGDSLHEHIANLAGSPAIKKGILQTVKVVDELVKVMGRHKPENIVIEMARENQTTQKGQKNSRERMKRIEEGIKELGSQILKEHPVENTQLQNEKLYLYYLQNGRDMYVDQELDINRLSDYDVAAIVPQSFLKDDSIDNKVLTRSDKARGKSDNVPSEEVVKKMKNYWRQLLNAKLITQRKFDNLTKAERGGLSELDKAGFIKRQLVETRQITKHVAQILDSRMNTKYDENDKLIREVKVITLKSKLVSDFRKDFQFYKVREINNYHHAHDAYLNAVVGTALIKKYPKLESEFVYGDYKVYDVRKMIAKSEQEIGKATAKYFFYSNIMNFFKTEITLANGEIRKRPLIETNGETGEIVWDKGRDFATVRKVLSMPQVNIVKKTEVQTGGFSKESILPKRNSDKLIARKKDWDPKKYGGFDSPTVAYSVLVVAKVEKGKSKKLKSVKELLGITIMERSSFEKNPIDFLEAKGYKEVKKDLIIKLPKYSLFELENGRKRMLASAGELQKGNELALPSKYVNFLYLASHYEKLKGSPEDNEQKQLFVEQHKHYLDEIIEQISEFSKRVILADANLDKVLSAYNKHRDKPIREQAENIIHLFTLTNLGAPAAFKYFDTTIDRKRYTSTKEVLDATLIHQSITGLYETRIDLSQLGGDSGGKRPAATKKAGQAKKKKSGGGGSVDLRTLDVFSGCGGLSEGFHQAGISDTLWAIEMWDPAAQAFRLNNPGSTVFTEDCNILLKLVMAGETTNSRGQRLPQKGDVEMLCGGPPCQGFSGMNRFNSRTYSKFKNSLVVSFLSYCDYYRPRFFLLENVRNFVSFKRSMVLKLTLRCLVRMGYQCTFGVLQAGQYGVAQTRRRAIILAAAPGEKLPLFPEPLHVFAPRACQLSVVVDDKKFVSNITRLSSGPFRTITVRDTMSDLPEVRNGASALEISYNGEPQSWFQRQLRGAQYQPILRDHICKDMSALVAARMRHIPLAPGSDWRDLPNIEVRLSDGTMARKLRYTHHDRKNGRSSSGALRGVCSCVEAGKACDPAARQFNTLIPWCLPHTGNRHNHWAGLYGRLEWDGFFSTTVTNPEPMGKQGRVLHPEQHRVVSVRECARSQGFPDTYRLFGNILDKHRQVGNAVPPPLAKAIGLEIKLCMLAKARESASAKIKEEEAAKDGGGGSGKRPAATKKAGQAKKKKGSYPYDVPDYA

SEQ ID NO: 35 - protein, 1986 aa, Artificial Sequence
  Description of Artificial Sequence: Synthetic polypeptide
MAPKKKRKVGIHGVPAADKKYSIGLAIGTNSVGWAVITDEYKVPSKKFKVLGNTDRHSIKKNLIGALLFDSGETAEATRLKRTARRRYTRRKNRICYLQEIFSNEMAKVDDSFFHRLEESFLVEEDKKHERHPIFGNIVDEVAYHEKYPTIYHLRKKLVDSTDKADLRLIYLALAHMIKFRGHFLIEGDLNPDNSDVDKLFIQLVQTYNQLFEENPINASGVDAKAILSARLSKSRRLENLIAQLPGEKKNGLFGNLIALSLGLTPNFKSNFDLAEDAKLQLSKDTYDDDLDNLLAQIGDQYADLFLAAKNLSDAILLSDILRVNTEITKAPLSASMIKRYDEHHQDLTLLKALVRQQLPEKYKEIFFDQSKNGYAGYIDGGASQEEFYKFIKPILEKMDGTEELLVKLNREDLLRKQRTFDNGSIPHQIHLGELHAILRRQEDFYPFLKDNREKIEKILTFRIPYYVGPLARGNSRFAWMTRKSEETITPWNFEEVVDKGASAQSFIERMTNFDKNLPNEKVLPKHSLLYEYFTVYNELTKVKYVTEGMRKPAFLSGEQKKAIVDLLFKTNRKVTVKQLKEDYFKKIECFDSVEISGVEDRFNASLGTYHDLLKIIKDKDFLDNEENEDILEDIVLTLTLFEDREMIEERLKTYAHLFDDKVMKQLKRRRYTGWGRLSRKLINGIRDKQSGKTILDFLKSDGFANRNFMQLIHDDSLTFKEDIQKAQVSGQGDSLHEHIANLAGSPAIKKGILQTVKVVDELVKVMGRHKPENIVIEMARENQTTQKGQKNSRERMKRIEEGIKELGSQILKEHPVENTQLQNEKLYLYYLQNGRDMYVDQELDINRLSDYDVAAIVPQSFLKDDSIDNKVLTRSDKARGKSDNVPSEEVVKKMKNYWRQLLNAKLITQRKFDNLTKAERGGLSELDKAGFIKRQLVETRQITKHVAQILDSRMNTKYDENDKLIREVKVITLKSKLVSDFRKDFQFYKVREINNYHHAHDAYLNAVVGTALIKKYPKLESEFVYGDYKVYDVRKMIAKSEQEIGKATAKYFFYSNIMNFFKTEITLANGEIRKRPLIETNGETGEIVWDKGRDFATVRKVLSMPQVNIVKKTEVQTGGFSKESILPKRNSDKLIARKKDWDPKKYGGFDSPTVAYSVLVVAKVEKGKSKKLKSVKELLGITIMERSSFEKNPIDFLEAKGYKEVKKDLIIKLPKYSLFELENGRKRMLASAGELQKGNELALPSKYVNFLYLASHYEKLKGSPEDNEQKQLFVEQHKHYLDEIIEQISEFSKRVILADANLDKVLSAYNKHRDKPIREQAENIIHLFTLTNLGAPAAFKYFDTTIDRKRYTSTKEVLDATLIHQSITGLYETRIDLSQLGGDSAGGGGSGGGGSGGGGSGPKKKRKVAAAGSNHDQEFDPPKVYPPVPAEKRKPIRVLSLFDGIATGLLVLKDLGIQVDRYIASEVCEDSITVGMVRHQGKIMYVGDVRSVTQKHIQEWGPFDLVIGGSPCNDLSIVNPARKGLYEGTGRLFFEFYRLLHDARPKEGDDRPFFWLFENVVAMGVSDKRDISRFLESNPVMIDAKEVSAAHRARYFWGNLPGMNRPLASTVNDKLELQECLEHGRIAKFSKVRTITTRSNSIKQGKDQHFPVFMNEKEDILWCTEMERVFGFPVHYTDVSNMSRLARQRLLGRSWSVPVIRHLFAPLKEYFACVSSGNSNANSRGPSFSSGLVPLSLRGSHMNPLEMFETVPVWRRQPVRVLSLFEDIKKELTSLGFLESGSDPGQLKHVVDVTDTVRKDVEEWGPFDLVYGATPPLGHTCDRPPSWYLFQFHRLLQYARPKPGSPRPFFWMFVDNLVLNKEDLDVASRFLEMEPVTIPDVHGGSLQNAVRVWSNIPAIRSRHWALVSEEELSLLAQNKQSSKLAAKWPTKLVKNCFLPLREYFKYFSTELTSSLSGGKRPAATKKAGQAKKKKGSYPYDVPDYA

SEQ ID NO: 36 - protein, 1986 aa, Artificial Sequence; identical to SEQ ID NO: 35
  Description of Artificial Sequence: Synthetic polypeptide

SEQ ID NO: 37 - protein, 1754 aa, Artificial Sequence
  Description of Artificial Sequence: Synthetic polypeptide
MAPKKKRKVGIHGVPAADKKYSIGLAIGTNSVGWAVITDEYKVPSKKFKVLGNTDRHSIKKNLIGALLFDSGETAEATRLKRTARRRYTRRKNRICYLQEIFSNEMAKVDDSFFHRLEESFLVEEDKKHERHPIFGNIVDEVAYHEKYPTIYHLRKKLVDSTDKADLRLIYLALAHMIKFRGHFLIEGDLNPDNSDVDKLFIQLVQTYNQLFEENPINASGVDAKAILSARLSKSRRLENLIAQLPGEKKNGLFGNLIALSLGLTPNFKSNFDLAEDAKLQLSKDTYDDDLDNLLAQIGDQYADLFLAAKNLSDAILLSDILRVNTEITKAPLSASMIKRYDEHHQDLTLLKALVRQQLPEKYKEIFFDQSKNGYAGYIDGGASQEEFYKFIKPILEKMDGTEELLVKLNREDLLRKQRTFDNGSIPHQIHLGELHAILRRQEDFYPFLKDNREKIEKILTFRIPYYVGPLARGNSRFAWMTRKSEETITPWNFEEVVDKGASAQSFIERMTNFDKNLPNEKVLPKHSLLYEYFTVYNELTKVKYVTEGMRKPAFLSGEQKKAIVDLLFKTNRKVTVKQLKEDYFKKIECFDSVEISGVEDRFNASLGTYHDLLKIIKDKDFLDNEENEDILEDIVLTLTLFEDREMIEERLKTYAHLFDDKVMKQLKRRRYTGWGRLSRKLINGIRDKQSGKTILDFLKSDGFANRNFMQLIHDDSLTFKEDIQKAQVSGQGDSLHEHIANLAGSPAIKKGILQTVKVVDELVKVMGRHKPENIVIEMARENQTTQKGQKNSRERMKRIEEGIKELGSQILKEHPVENTQLQNEKLYLYYLQNGRDMYVDQELDINRLSDYDVAAIVPQSFLKDDSIDNKVLTRSDKARGKSDNVPSEEVVKKMKNYWRQLLNAKLITQRKFDNLTKAERGGLSELDKAGFIKRQLVETRQITKHVAQILDSRMNTKYDENDKLIREVKVITLKSKLVSDFRKDFQFYKVREINNYHHAHDAYLNAVVGTALIKKYPKLESEFVYGDYKVYDVRKMIAKSEQEIGKATAKYFFYSNIMNFFKTEITLANGEIRKRPLIETNGETGEIVWDKGRDFATVRKVLSMPQVNIVKKTEVQTGGFSKESILPKRNSDKLIARKKDWDPKKYGGFDSPTVAYSVLVVAKVEKGKSKKLKSVKELLGITIMERSSFEKNPIDFLEAKGYKEVKKDLIIKLPKYSLFELENGRKRMLASAGELQKGNELALPSKYVNFLYLASHYEKLKGSPEDNEQKQLFVEQHKHYLDEIIEQISEFSKRVILADANLDKVLSAYNKHRDKPIREQAENIIHLFTLTNLGAPAAFKYFDTTIDRKRYTSTKEVLDATLIHQSITGLYETRIDLSQLGGDSGGKRPAATKKAGQAKKKKSGGGGSVDVLRRRKDWNVRLQAFFTSDTGLEYEAPKLYPAIPAARRRPIRVLSLFDGIATGYLVLKELGIKVGKYVASEVCEESIAVGTVKHEGNIKYVNDVRNITKKNIEEWGPFDLVIGGSPCNDLSNVNPARKGLYEGTGRLFFEFYHLLNYSRPKEGDDRPFFWMFENVVAMKVGDKRDISRFLECNPVMIDAIKVSAAHRARYFWGNLPGMNRPVIASKNDKLELQDCLEYNRIAKLKKVQTITTKSNSIKQGKNQLFPVVMNGKEDVLWCTELERIFGFPVHYTDVSNMGRGARQKLLGRSWSVPVIRHLFAPLKDYFACEGGGGSGKRPAATKKAGQAKKKKGS

SEQ ID NO: 38 - protein, 1708 aa, Artificial Sequence
  Description of Artificial Sequence: Synthetic polypeptide
MAPKKKRKVGIHGVPAASGGGGSGNRAIRTEKIICRDVARGYENVPIPCVNGVDGEPCPEDYKYISENCETSTMNIDRNITHLQHCTCVDDCSSSNCLCGQLSIRCWYDKDGRLLQEFNKIEPPLIFECNQACSCWRNCKNRVVQSGIKVRLQLYRTAKMGWGVRALQTIPQGTFICEYVGELISDAEADVREDDSYLFDLDNKDGEVYCIDARYYGNISRFINHLCDPNIIPVRVFMLHQDLRFPRIAFFSSRDIRTGEELGFDYGDRFWDIKSKYFTCQCGSEKCKHSAEAIALEQSRLARLDGGGGSGDKKYSIGLAIGTNSVGWAVITDEYKVPSKKFKVLGNTDRHSIKKNLIGALLFDSGETAEATRLKRTARRRYTRRKNRICYLQEIFSNEMAKVDDSFFHRLEESFLVEEDKKHERHPIFGNIVDEVAYHEKYPTIYHLRKKLVDSTDKADLRLIYLALAHMIKFRGHFLIEGDLNPDNSDVDKLFIQLVQTYNQLFEENPINASGVDAKAILSARLSKSRRLENLIAQLPGEKKNGLFGNLIALSLGLTPNFKSNFDLAEDAKLQLSKDTYDDDLDNLLAQIGDQYADLFLAAKNLSDAILLSDILRVNTEITKAPLSASMIKRYDEHHQDLTLLKALVRQQLPEKYKEIFFDQSKNGYAGYIDGGASQEEFYKFIKPILEKMDGTEELLVKLNREDLLRKQRTFDNGSIPHQIHLGELHAILRRQEDFYPFLKDNREKIEKILTFRIPYYVGPLARGNSRFAWMTRKSEETITPWNFEEVVDKGASAQSFIERMTNFDKNLPNEKVLPKHSLLYEYFTVYNELTKVKYVTEGMRKPAFLSGEQKKAIVDLLFKTNRKVTVKQLKEDYFKKIECFDSVEISGVEDRFNASLGTYHDLLKIIKDKDFLDNEENEDILEDIVLTLTLFEDREMIEERLKTYAHLFDDKVMKQLKRRRYTGWGRLSRKLINGIRDKQSGKTILDFLKSDGFANRNFMQLIHDDSLTFKEDIQKAQVSGQGDSLHEHIANLAGSPAIKKGILQTVKVVDELVKVMGRHKPENIVIEMARENQTTQKGQKNSRERMKRIEEGIKELGSQILKEHPVENTQLQNEKLYLYYLQNGRDMYVDQELDINRLSDYDVAAIVPQSFLKDDSIDNKVLTRSDKARGKSDNVPSEEVVKKMKNYWRQLLNAKLITQRKFDNLTKAERGGLSELDKAGFIKRQLVETRQITKHVAQILDSRMNTKYDENDKLIREVKVITLKSKLVSDFRKDFQFYKVREINNYHHAHDAYLNAVVGTALIKKYPKLESEFVYGDYKVYDVRKMIAKSEQEIGKATAKYFFYSNIMNFFKTEITLANGEIRKRPLIETNGETGEIVWDKGRDFATVRKVLSMPQVNIVKKTEVQTGGFSKESILPKRNSDKLIARKKDWDPKKYGGFDSPTVAYSVLVVAKVEKGKSKKLKSVKELLGITIMERSSFEKNPIDFLEAKGYKEVKKDLIIKLPKYSLFELENGRKRMLASAGELQKGNELALPSKYVNFLYLASHYEKLKGSPEDNEQKQLFVEQHKHYLDEIIEQISEFSKRVILADANLDKVLSAYNKHRDKPIREQAENIIHLFTLTNLGAPAAFKYFDTTIDRKRYTSTKEVLDATLIHQSITGLYETRIDLSQLGGDSGGKRPAATKKAGQAKKKKGSYPYDVPDYA

SEQ ID NO: 39 - protein, 1818 aa, Artificial Sequence
  Description of Artificial Sequence: Synthetic polypeptide
MAPKKKRKVGIHGVPAADKKYSIGLAIGTNSVGWAVITDEYKVPSKKFKVLGNTDRHSIKKNLIGALLFDSGETAEATRLKRTARRRYTRRKNRICYLQEIFSNEMAKVDDSFFHRLEESFLVEEDKKHERHPIFGNIVDEVAYHEKYPTIYHLRKKLVDSTDKADLRLIYLALAHMIKFRGHFLIEGDLNPDNSDVDKLFIQLVQTYNQLFEENPINASGVDAKAILSARLSKSRRLENLIAQLPGEKKNGLFGNLIALSLGLTPNFKSNFDLAEDAKLQLSKDTYDDDLDNLLAQIGDQYADLFLAAKNLSDAILLSDILRVNTEITKAPLSASMIKRYDEHHQDLTLLKALVRQQLPEKYKEIFFDQSKNGYAGYIDGGASQEEFYKFIKPILEKMDGTEELLVKLNREDLLRKQRTFDNGSIPHQIHLGELHAILRRQEDFYPFLKDNREKIEKILTFRIPYYVGPLARGNSRFAWMTRKSEETITPWNFEEVVDKGASAQSFIERMTNFDKNLPNEKVLPKHSLLYEYFTVYNELTKVKYVTEGMRKPAFLSGEQKKAIVDLLFKTNRKVTVKQLKEDYFKKIECFDSVEISGVEDRFNASLGTYHDLLKIIKDKDFLDNEENEDILEDIVLTLTLFEDREMIEERLKTYAHLFDDKVMKQLKRRRYTGWGRLSRKLINGIRDKQSGKTILDFLKSDGFANRNFMQLIHDDSLTFKEDIQKAQVSGQGDSLHEHIANLAGSPAIKKGILQTVKVVDELVKVMGRHKPENIVIEMARENQTTQKGQKNSRERMKRIEEGIKELGSQILKEHPVENTQLQNEKLYLYYLQNGRDMYVDQELDINRLSDYDVAAIVPQSFLKDDSIDNKVLTRSDKARGKSDNVPSEEVVKKMKNYWRQLLNAKLITQRKFDNLTKAERGGLSELDKAGFIKRQLVETRQITKHVAQILDSRMNTKYDENDKLIREVKVITLKSKLVSDFRKDFQFYKVREINNYHHAHDAYLNAVVGTALIKKYPKLESEFVYGDYKVYDVRKMIAKSEQEIGKATAKYFFYSNIMNFFKTEITLANGEIRKRPLIETNGETGEIVWDKGRDFATVRKVLSMPQVNIVKKTEVQTGGFSKESILPKRNSDKLIARKKDWDPKKYGGFDSPTVAYSVLVVAKVEKGKSKKLKSVKELLGITIMERSSFEKNPIDFLEAKGYKEVKKDLIIKLPKYSLFELENGRKRMLASAGELQKGNELALPSKYVNFLYLASHYEKLKGSPEDNEQKQLFVEQHKHYLDEIIEQISEFSKRVILADANLDKVLSAYNKHRDKPIREQAENIIHLFTLTNLGAPAAFKYFDTTIDRKRYTSTKEVLDATLIHQSITGLYETRIDLSQLGGDSGGKRPAATKKAGQAKKKKSGGGGSEEPEEPADSGQSLVPVYIYSPEYVSMCDSLAKIPKRASMVHSLIEAYALHKQMRIVKPKVASMEEMATFHTDAYLQHLQKVSQEGDDDHPDSIEYGLGYDCPATEGIFDYAAAIGGATITAAQCLIDGMCKVAINWSGGWHHAKKDEASGFCYLNDAVLGILRLRRKFERILYVDLDLHHGDGVEDAFSFTSKVMTVSLHKFSPGFFPGTGDVSDVGLGKGRYYSVNVPIQDGIQDEKYYQICESVLKEVYQAFNPKAVVLQLGADTIAGDPMCSFNMTPVGIGKCLKYILQWQLATLILGGGGYNLANTARCWTYLTGVILGKTLSSEIPDHEFFTAYGPDYVLEITPSCRPDRNEPHRIQQILNYIKGNLKHVVGGGGSGKRPAATKKAGQAKKKKGSYPYDVPDYA

SEQ ID NO: 40 - protein, 2290 aa, Artificial Sequence
  Description of Artificial Sequence: Synthetic polypeptide
MAPKKKRKVGIHGVPAADKKYSIGLAIGTNSVGWAVITDEYKVPSKKFKVLGNTDRHSIKKNLIGALLFDSGETAEATRLKRTARRRYTRRKNRICYLQEIFSNEMAKVDDSFFHRLEESFLVEEDKKHERHPIFGNIVDEVAYHEKYPTIYHLRKKLVDSTDKADLRLIYLALAHMIKFRGHFLIEGDLNPDNSDVDKLFIQLVQTYNQLFEENPINASGVDAKAILSARLSKSRRLENLIAQLPGEKKNGLFGNLIALSLGLTPNFKSNFDLAEDAKLQLSKDTYDDDLDNLLAQIGDQYADLFLAAKNLSDAILLSDILRVNTEITKAPLSASMIKRYDEHHQDLTLLKALVRQQLPEKYKEIFFDQSKNGYAGYIDGGASQEEFYKFIKPILEKMDGTEELLVKLNREDLLRKQRTFDNGSIPHQIHLGELHAILRRQEDFYPFLKDNREKIEKILTFRIPYYVGPLARGNSRFAWMTRKSEETITPWNFEEVVDKGASAQSFIERMTNFDKNLPNEKVLPKHSLLYEYFTVYNELTKVKYVTEGMRKPAFLSGEQKKAIVDLLFKTNRKVTVKQLKEDYFKKIECFDSVEISGVEDRFNASLGTYHDLLKIIKDKDFLDNEENEDILEDIVLTLTLFEDREMIEERLKTYAHLFDDKVMKQLKRRRYTGWGRLSRKLINGIRDKQSGKTILDFLKSDGFANRNFMQLIHDDSLTFKEDIQKAQVSGQGDSLHEHIANLAGSPAIKKGILQTVKVVDELVKVMGRHKPENIVIEMARENQTTQKGQKNSRERMKRIEEGIKELGSQILKEHPVENTQLQNEKLYLYYLQNGRDMYVDQELDINRLSDYDVAAIVPQSFLKDDSIDNKVLTRSDKARGKSDNVPSEEVVKKMKNYWRQLLNAKLITQRKFDNLTKAERGGLSELDKAGFIKRQLVETRQITKHVAQILDSRMNTKYDENDKLIREVKVITLKSKLVSDFRKDFQFYKVREINNYHHAHDAYLNAVVGTALIKKYPKLESEFVYGDYKVYDVRKMIAKSEQEIGKATAKYFFYSNIMNFFKTEITLANGEIRKRPLIETNGETGEIVWDKGRDFATVRKVLSMPQVNIVKKTEVQTGGFSKESILPKRNSDKLIARKKDWDPKKYGGFDSPTVAYSVLVVAKVEKGKSKKLKSVKELLGITIMERSSFEKNPIDFLEAKGYKEVKKDLIIKLPKYSLFELENGRKRMLASAGELQKGNELALPSKYVNFLYLASHYEKLKGSPEDNEQKQLFVEQHKHYLDEIIEQISEFSKRVILADANLDKVLSAYNKHRDKPIREQAENIIHLFTLTNLGAPAAFKYFDTTIDRKRYTSTKEVLDATLIHQSITGLYETRIDLSQLGGDSGGKRPAATKKAGQAKKKKESGGGSLSGKKAAAAAAAAAAAATGTEAGPGTAGGSENGSEVAAQPAGLSGPAEVGPGAVGERTPRKKEPPRASPPGGLAEPPGSAGPQAGPTVVPGSATPMETGIAETPEGRRTSRRKRAKVEYREMDESLANLSEDEYYSEEERNAKAEKEKKLPPPPPQAPPEEENESEPEEPSGVEGAAFQSRLPHDRMTSQEAACFPDIISGPQQTQKVFLFIRNRTLQLWLDNPKIQLTFEATLQQLEAPYNSDTVLVHRVHSYLERHGLINFGIYKRIKPLPTKKTGKVIIIGSGVSGLAAARQLQSFGMDVTLLEARDRVGGRVATFRKGNYVADLGAMVVTGLGGNPMAVVSKQVNMELAKIKQKCPLYEANGQAVPKEKDEMVEQEFNRLLEATSYLSHQLDFNVLNNKHVSLGQALEVVIQLQEKHVKDEQIEHWKKIVKTQEELKELLNKMVNLKEKIKELHQQYKEASEVKPPRDITAEFLVKSKHRDLTALCKEYDELAETQGKLEEKLQELEANPPSDVYLSSRDRQILDWHFANLEFANATPLSTLSLKHWDQDDDFEFTGSHLTVRNGYSCVPVALAEGLDIKLNTAVRQVRYTASGCEVIAVNTRSTSQTFIYKCDAVLCTLPLGVLKQQPPAVQFVPPLPEWKTSAVQRMGFGNLNKVVLCFDRVFWDPSVNLFGHVGSTTASRGELFLFWNLYKAPILLALVAGEAAGIMENISDDVIVGRCLAILKGIFGSSAVPQPKETVVSRWRADPWARGSYSYVAAGSSGNDYDLMAQPITPGPSIPGAPQPIPRLFFAGEHTIRNYPATVHGALLSGLREAGRIADQFLGAMYTLPRQATPGVPAQQSPSMSGGKRPAATKKAGQAKKKKGSYPYDVPDYA

SEQ ID NO: 41 - protein, 2177 aa, Artificial Sequence
  Description of Artificial Sequence: Synthetic polypeptide
MAPKKKRKVGGSGGSGQTGKKSEKGPVCWRKRVKSEYMRLRQLKRFRRADEVKSMFSSNRQKILERTEILNQEWKQRRIQPVHILTSVSSLRGTRECSVTSDLDFPTQVIPLKTLNAVASVPIMYSWSPLQQNFMVEDETVLHNIPYMGDEVLDQDGTFIEELIKNYDGKVHGDRECGFINDEIFVELVNALGQYNDDDDDDDGDDPEEREEKQKDLEDHRDDKESRPPRKFPSDKIFEAISSMFPDKGTAEELKEKYKELTEQQLPGALPPECTPNIDGPNAKSVQREQSLHSFHTLFCRRCFKYDCFLHPFHATPNTYKRKNTETALDNKPCGPQCYQHLEGAKEFAAALTAERIKTPPKRPGGRRRGRLPNNSSRPSTPTINVLESKDTDSDREAGTETGGENNDKEEEEKKDETSSSSEANSRCQTPIKMKPNIEPPENVEWSGAEASMFRVLIGTYYDNFCAIARLIGTKTCRQVYEFRVKESSIIAPAPAEDVDTPPRKKKRKHRLWAAHCRKIQLKKDGSSNHVYNYQPCDHPRQPCDSSCPCVIAQNFCEKFCQCSSECQNRFPGCRCKAQCNTKQCPCYLAVRECDPDLCLTCGAADHWDSKNVSCKNCSIQRGSKKHLLLAPSDVAGWGIFIKDPVQKNEFISEYCGEIISQDEADRRGKVYDKYMCSFLFNLNNDFVVDATRKGNKIRFANHSVNPNCYAKVMMVNGDHRIGIFAKRAIQTGEELFFDYRYSQADALKYVGIEREMEIPSTGGSGGSGGSGGSGGSGRPDKKYSIGLAIGTNSVGWAVITDEYKVPSKKFKVLGNTDRHSIKKNLIGALLFDSGETAEATRLKRTARRRYTRRKNRICYLQEIFSNEMAKVDDSFFHRLEESFLVEEDKKHERHPIFGNIVDEVAYHEKYPTIYHLRKKLVDSTDKADLRLIYLALAHMIKFRGHFLIEGDLNPDNSDVDKLFIQLVQTYNQLFEENPINASGVDAKAILSARLSKSRRLENLIAQLPGEKKNGLFGNLIALSLGLTPNFKSNFDLAEDAKLQLSKDTYDDDLDNLLAQIGDQYADLFLAAKNLSDAILLSDILRVNTEITKAPLSASMIKRYDEHHQDLTLLKALVRQQLPEKYKEIFFDQSKNGYAGYIDGGASQEEFYKFIKPILEKMDGTEELLVKLNREDLLRKQRTFDNGSIPHQIHLGELHAILRRQEDFYPFLKDNREKIEKILTFRIPYYVGPLARGNSRFAWMTRKSEETITPWNFEEVVDKGASAQSFIERMTNFDKNLPNEKVLPKHSLLYEYFTVYNELTKVKYVTEGMRKPAFLSGEQKKAIVDLLFKTNRKVTVKQLKEDYFKKIECFDSVEISGVEDRFNASLGTYHDLLKIIKDKDFLDNEENEDILEDIVLTLTLFEDREMIEERLKTYAHLFDDKVMKQLKRRRYTGWGRLSRKLINGIRDKQSGKTILDFLKSDGFANRNFMQLIHDDSLTFKEDIQKAQVSGQGDSLHEHIANLAGSPAIKKGILQTVKVVDELVKVMGRHKPENIVIEMARENQTTQKGQKNSRERMKRIEEGIKELGSQILKEHPVENTQLQNEKLYLYYLQNGRDMYVDQELDINRLSDYDVAAIVPQSFLKDDSIDNKVLTRSDKARGKSDNVPSEEVVKKMKNYWRQLLNAKLITQRKFDNLTKAERGGLSELDKAGFIKRQLVETRQITKHVAQILDSRMNTKYDENDKLIREVKVITLKSKLVSDFRKDFQFYKVREINNYHHAHDAYLNAVVGTALIKKYPKLESEFVYGDYKVYDVRKMIAKSEQEIGKATAKYFFYSNIMNFFKTEITLANGEIRKRPLIETNGETGEIVWDKGRDFATVRKVLSMPQVNIVKKTEVQTGGFSKESILPKRNSDKLIARKKDWDPKKYGGFDSPTVAYSVLVVAKVEKGKSKKLKSVKELLGITIMERSSFEKNPIDFLEAKGYKEVKKDLIIKLPKYSLFELENGRKRMLASAGELQKGNELALPSKYVNFLYLASHYEKLKGSPEDNEQKQLFVEQHKHYLDEIIEQISEFSKRVILADANLDKVLSAYNKHRDKPIREQAENIIHLFTLTNLGAPAAFKYFDTTIDRKRYTSTKEVLDATLIHQSITGLYETRIDLSQLGGDSGGKRPAATKKAGQAKKKKGSYPYDVPDYA

SEQ ID NO: 42 - protein, 2301 aa, Artificial Sequence
  Description of Artificial Sequence: Synthetic polypeptide
MAPKKKRKVGGSGGSGQTGKKSEKGPVCWRKRVKSEYMRLRQLKRFRRADEVKSMFSSNRQKILERTEILNQEWKQRRIQPVHILTSVSSLRGTRECSVTSDLDFPTQVIPLKTLNAVASVPIMYSWSPLQQNFMVEDETVLHNIPYMGDEVLDQDGTFIEELIKNYDGKVHGDRECGFINDEIFVELVNALGQYNDDDDDDDGDDPEEREEKQKDLEDHRDDKESRPPRKFPSDKIFEAISSMFPDKGTAEELKEKYKELTEQQLPGALPPECTPNIDGPNAKSVQREQSLHSFHTLFCRRCFKYDCFLHPFHATPNTYKRKNTETALDNKPCGPQCYQHLEGAKEFAAALTAERIKTPPKRPGGRRRGRLPNNSSRPSTPTINVLESKDTDSDREAGTETGGENNDKEEEEKKDETSSSSEANSRCQTPIKMKPNIEPPENVEWSGAEASMFRVLIGTYYDNFCAIARLIGTKTCRQVYEFRVKESSIIAPAPAEDVDTPPRKKKRKHRLWAAHCRKIQLKKDGSSNHVYNYQPCDHPRQPCDSSCPCVIAQNFCEKFCQCSSECQNRFPGCRCKAQCNTKQCPCYLAVRECDPDLCLTCGAADHWDSKNVSCKNCSIQRGSKKHLLLAPSDVAGWGIFIKDPVQKNEFISEYCGEIISQDEADRRGKVYDKYMCSFLFNLNNDFVVDATRKGNKIRFANHSVNPNCYAKVMMVNGDHRIGIFAKRAIQTGEELFFDYRYSQADALKYVGIEREMEIPSTGGSGGSGGSGGSGGSGRPDKKYSIGLAIGTNSVGWAVITDEYKVPSKKFKVLGNTDRHSIKKNLIGALLFDSGETAEATRLKRTARRRYTRRKNRICYLQEIFSNEMAKVDDSFFHRLEESFLVEEDKKHERHPIFGNIVDEVAYHEKYPTIYHLRKKLVDSTDKADLRLIYLALAHMIKFRGHFLIEGDLNPDNSDVDKLFIQLVQTYNQLFEENPINASGVDAKAILSARLSKSRRLENLIAQLPGEKKNGLFGNLIALSLGLTPNFKSNFDLAEDAKLQLSKDTYDDDLDNLLAQIGDQYADLFLAAKNLSDAILLSDILRVNTEITKAPLSASMIKRYDEHHQDLTLLKALVRQQLPEKYKEIFFDQSKNGYAGYIDGGASQEEFYKFIKPILEKMDGTEELLVKLNREDLLRKQRTFDNGSIPHQIHLGELHAILRRQEDFYPFLKDNREKIEKILTFRIPYYVGPLARGNSRFAWMTRKSEETITPWNFEEVVDKGASAQSFIERMTNFDKNLPNEKVLPKHSLLYEYFTVYNELTKVKYVTEGMRKPAFLSGEQKKAIVDLLFKTNRKVTVKQLKEDYFKKIECFDSVEISGVEDRFNASLGTYHDLLKIIKDKDFLDNEENEDILEDIVLTLTLFEDREMIEERLKTYAHLFDDKVMKQLKRRRYTGWGRLSRKLINGIRDKQSGKTILDFLKSDGFANRNFMQLIHDDSLTFKEDIQKAQVSGQGDSLHEHIANLAGSPAIKKGILQTVKVVDELVKVMGRHKPENIVIEMARENQTTQKGQKNSRERMKRIEEGIKELGSQILKEHPVENTQLQNEKLYLYYLQNGRDMYVDQELDINRLSDYDVAAIVPQSFLKDDSIDNKVLTRSDKARGKSDNVPSEEVVKKMKNYWRQLLNAKLITQRKFDNLTKAERGGLSELDKAGFIKRQLVETRQITKHVAQILDSRMNTKYDENDKLIREVKVITLKSKLVSDFRKDFQFYKVREINNYHHAHDAYLNAVVGTALIKKYPKLESEFVYGDYKVYDVRKMIAKSEQEIGKATAKYFFYSNIMNFFKTEITLANGEIRKRPLIETNGETGEIVWDKGRDFATVRKVLSMPQVNIVKKTEVQTGGFSKESILPKRNSDKLIARKKDWDPKKYGGFDSPTVAYSVLVVAKVEKGKSKKLKSVKELLGITIMERSSFEKNPIDFLEAKGYKEVKKDLIIKLPKYSLFELENGRKRMLASAGELQKGNELALPSKYVNFLYLASHYEKLKGSPEDNEQKQLFVEQHKHYLDEIIEQISEFSKRVILADANLDKVLSAYNKHRDKPIREQAENIIHLFTLTNLGAPAAFKYFDTTIDRKRYTSTKEVLDATLIHQSITGLYETRIDLSQLGGDSGGKRPAATKKAGQAKKKKSGGGGSDAKSLTAWSRTLVTFKDVFVDFTREEWKLLDTAQQILYRNVMLENYKNLVSLGYQLTKPDVILRLEKGEEPWLVEREIHQETHPDSETAFEIKSSVGGGGSGKRPAATKKAGQAKKKKGSYPYDVPDYA

SEQ ID NO: 43 - protein, 1932 aa, Artificial Sequence
  Description of Artificial Sequence: Synthetic polypeptide
MAPKKKRKVGIHGVPAASGGGGSGSAAIAEVLLNARCDLHAVNYHGDTPLHIAARESYHDCVLLFLSRGANPELRNKEGDTAWDLTPERSDVWFALQLNRKLRLGVGNRAIRTEKIICRDVARGYENVPIPCVNGVDGEPCPEDYKYISENCETSTMNIDRNITHLQHCTCVDDCSSSNCLCGQLSIRCWYDKDGRLLQEFNKIEPPLIFECNQACSCWRNCKNRVVQSGIKVRLQLYRTAKMGWGVRALQTIPQGTFICEYVGELISDAEADVREDDSYLFDLDNKDGEVYCIDARYYGNISRFINHLCDPNIIPVRVFMLHQDLRFPRIAFFSSRDIRTGEELGFDYGDRFWDIKSKYFTCQCGSEKCKHSAEAIALEQSRLARLDPHPELLPELGSLPPVNTGGGGSGDKKYSIGLAIGTNSVGWAVITDEYKVPSKKFKVLGNTDRHSIKKNLIGALLFDSGETAEATRLKRTARRRYTRRKNRICYLQEIFSNEMAKVDDSFFHRLEESFLVEEDKKHERHPIFGNIVDEVAYHEKYPTIYHLRKKLVDSTDKADLRLIYLALAHMIKFRGHFLIEGDLNPDNSDVDKLFIQLVQTYNQLFEENPINASGVDAKAILSARLSKSRRLENLIAQLPGEKKNGLFGNLIALSLGLTPNFKSNFDLAEDAKLQLSKDTYDDDLDNLLAQIGDQYADLFLAAKNLSDAILLSDILRVNTEITKAPLSASMIKRYDEHHQDLTLLKALVRQQLPEKYKEIFFDQSKNGYAGYIDGGASQEEFYKFIKPILEKMDGTEELLVKLNREDLLRKQRTFDNGSIPHQIHLGELHAILRRQEDFYPFLKDNREKIEKILTFRIPYYVGPLARGNSRFAWMTRKSEETITPWNFEEVVDKGASAQSFIERMTNFDKNLPNEKVLPKHSLLYEYFTVYNELTKVKYVTEGMRKPAFLSGEQKKAIVDLLFKTNRKVTVKQLKEDYFKKIECFDSVEISGVEDRFNASLGTYHDLLKIIKDKDFLDNEENEDILEDIVLTLTLFEDREMIEERLKTYAHLFDDKVMKQLKRRRYTGWGRLSRKLINGIRDKQSGKTILDFLKSDGFANRNFMQLIHDDSLTFKEDIQKAQVSGQGDSLHEHIANLAGSPAIKKGILQTVKVVDELVKVMGRHKPENIVIEMARENQTTQKGQKNSRERMKRIEEGIKELGSQILKEHPVENTQLQNEKLYLYYLQNGRDMYVDQELDINRLSDYDVAAIVPQSFLKDDSIDNKVLTRSDKARGKSDNVPSEEVVKKMKNYWRQLLNAKLITQRKFDNLTKAERGGLSELDKAGFIKRQLVETRQITKHVAQILDSRMNTKYDENDKLIREVKVITLKSKLVSDFRKDFQFYKVREINNYHHAHDAYLNAVVGTALIKKYPKLESEFVYGDYKVYDVRKMIAKSEQEIGKATAKYFFYSNIMNFFKTEITLANGEIRKRPLIETNGETGEIVWDKGRDFATVRKVLSMPQVNIVKKTEVQTGGFSKESILPKRNSDKLIARKKDWDPKKYGGFDSPTVAYSVLVVAKVEKGKSKKLKSVKELLGITIMERSSFEKNPIDFLEAKGYKEVKKDLIIKLPKYSLFELENGRKRMLASAGELQKGNELALPSKYVNFLYLASHYEKLKGSPEDNEQKQLFVEQHKHYLDEIIEQISEFSKRVILADANLDKVLSAYNKHRDKPIREQAENIIHLFTLTNLGAPAAFKYFDTTIDRKRYTSTKEVLDATLIHQSITGLYETRIDLSQLGGDSGGKRPAATKKAGQAKKKKSGGGGSDAKSLTAWSRTLVTFKDVFVDFTREEWKLLDTAQQILYRNVMLENYKNLVSLGYQLTKPDVILRLEKGEEPWLVEREIHQETHPDSETAFEIKSSVGGGGSGKRPAATKKAGQAKKKKGSYPYDVPDYA

SEQ ID NO: 44 - protein, 1542 aa, Artificial Sequence
  Description of Artificial Sequence: Synthetic polypeptide
MAPKKKRKVGIHGVPAASGGGGSSRRKQSNPRQIKRSLGDMEAREEVQLVGASHMEQKATAPEAPSPGGGGSGDKKYSIGLAIGTNSVGWAVITDEYKVPSKKFKVLGNTDRHSIKKNLIGALLFDSGETAEATRLKRTARRRYTRRKNRICYLQEIFSNEMAKVDDSFFHRLEESFLVEEDKKHERHPIFGNIVDEVAYHEKYPTIYHLRKKLVDSTDKADLRLIYLALAHMIKFRGHFLIEGDLNPDNSDVDKLFIQLVQTYNQLFEENPINASGVDAKAILSARLSKSRRLENLIAQLPGEKKNGLFGNLIALSLGLTPNFKSNFDLAEDAKLQLSKDTYDDDLDNLLAQIGDQYADLFLAAKNLSDAILLSDILRVNTEITKAPLSASMIKRYDEHHQDLTLLKALVRQQLPEKYKEIFFDQSKNGYAGYIDGGASQEEFYKFIKPILEKMDGTEELLVKLNREDLLRKQRTFDNGSIPHQIHLGELHAILRRQEDFYPFLKDNREKIEKILTFRIPYYVGPLARGNSRFAWMTRKSEETITPWNFEEVVDKGASAQSFIERMTNFDKNLPNEKVLPKHSLLYEYFTVYNELTKVKYVTEGMRKPAFLSGEQKKAIVDLLFKTNRKVTVKQLKEDYFKKIECFDSVEISGVEDRFNASLGTYHDLLKIIKDKDFLDNEENEDILEDIVLTLTLFEDREMIEERLKTYAHLFDDKVMKQLKRRRYTGWGRLSRKLINGIRDKQSGKTILDFLKSDGFANRNFMQLIHDDSLTFKEDIQKAQVSGQGDSLHEHIANLAGSPAIKKGILQTVKVVDELVKVMGRHKPENIVIEMARENQTTQKGQKNSRERMKRIEEGIKELGSQILKEHPVENTQLQNEKLYLYYLQNGRDMYVDQELDINRLSDYDVAAIVPQSFLKDDSIDNKVLTRSDKARGKSDNVPSEEVVKKMKNYWRQLLNAKLITQRKFDNLTKAERGGLSELDKAGFIKRQLVETRQITKHVAQILDSRMNTKYDENDKLIREVKVITLKSKLVSDFRKDFQFYKVREINNYHHAHDAYLNAVVGTALIKKYPKLESEFVYGDYKVYDVRKMIAKSEQEIGKATAKYFFYSNIMNFFKTEITLANGEIRKRPLIETNGETGEIVWDKGRDFATVRKVLSMPQVNIVKKTEVQTGGFSKESILPKRNSDKLIARKKDWDPKKYGGFDSPTVAYSVLVVAKVEKGKSKKLKSVKELLGITIMERSSFEKNPIDFLEAKGYKEVKKDLIIKLPKYSLFELENGRKRMLASAGELQKGNELALPSKYVNFLYLASHYEKLKGSPEDNEQKQLFVEQHKHYLDEIIEQISEFSKRVILADANLDKVLSAYNKHRDKPIREQAENIIHLFTLTNLGAPAAFKYFDTTIDRKRYTSTKEVLDATLIHQSITGLYETRIDLSQLGGDSGGKRPAATKKAGQAKKKKSGGGGSSRRKQSNPRQIKRSLGDMEAREEVQLVGASHMEQKATAPEAPSPGGGGSGKRPAATKKAGQAKKKKGSYPYDVPDYA

SEQ ID NO: 45 - DNA, 4101 bp, Artificial Sequence
  Description of Artificial Sequence: Synthetic polynucleotide
gacaagaagtacagcatcggcctggccatcggcaccaacagcgtgggctgggccgtgatcaccgacgagtacaaggtgcccagcaagaagttcaaggtgctgggcaacaccgaccggcacagcatcaagaagaacctgatcggcgccctgctgttcgacagcggcgagaccgccgaggccacccggctgaagcggaccgcccggcggcggtacacccggcggaagaaccggatctgctacctgcaggagatcttcagcaacgagatggccaaggtggacgacagcttcttccaccggctggaggagagcttcctggtggaggaggacaagaagcacgagcggcaccccatcttcggcaacatcgtggacgaggtggcctaccacgagaagtaccccaccatctaccacctgcggaagaagctggtggacagcaccgacaaggccgacctgcggctgatctacctggccctggcccacatgatcaagttccggggccacttcctgatcgagggcgacctgaaccccgacaacagcgacgtggacaagctgttcatccagctggtgcagacctacaaccagctgttcgaggagaaccccatcaacgccagcggcgtggacgccaaggccatcctgagcgcccggctgagcaagagccggcggctggagaacctgatcgcccagctgcccggcgagaagaagaacggcctgttcggcaacctgatcgccctgagcctgggcctgacccccaacttcaagagcaacttcgacctggccgaggacgccaagctgcagctgagcaaggacacctacgacgacgacctggacaacctgctggcccagatcggcgaccagtacgccgacctgttcctggccgccaagaacctgagcgacgccatcctgctgagcgacatcctgcgggtgaacaccgagatcaccaaggcccccctgagcgccagcatgatcaagcggtacgacgagcaccaccaggacctgaccctgctgaaggccctggtgcggcagcagctgcccgagaagtacaaggagatcttcttcgaccagagcaagaacggctacgccggctacatcgacggcggcgccagccaggaggagttctacaagttcatcaagcccatcctggagaagatggacggcaccgaggagctgctggtgaagctgaaccgggaggacctgctgcggaagcagcggaccttcgacaacggcagcatcccccaccagatccacctgggcgagctgcacgccatcctgcggcggcaggaggacttctaccccttcctgaaggacaaccgggagaagatcgagaagatcctgaccttccggatcccctactacgtgggccccctggcccggggcaacagccggttcgcctggatgacccggaaatccgaggagaccatcaccccctggaacttcgaggaggtggtggacaagggcgccagcgcccagagcttcatcgagcggatgaccaacttcgacaagaacctgcccaacgagaaggtgctgcccaagcacagcctgctgtacgagtacttcaccgtgtacaacgagctgaccaaggtgaagtacgtgaccgagggcatgcggaagcccgccttcctgagcggcgagcagaagaaggccatcgtggacctgctgttcaagaccaaccggaaggtgaccgtgaagcagctgaaggaggactacttcaagaagatcgagtgcttcgacagcgtggagatcagcggcgtggaggaccggttcaacgccagcctgggcacctaccacgacctgctgaagatcatcaaggacaaggacttcctggacaacgaggagaacgaggacatcctggaggacatcgtgctgaccctgaccctgttcgaggaccgggagatgatcgaggagcggctgaaaacctacgcccacctgttcgacgacaaggtgatgaagcagctgaagcggcggcggtacaccggctggggccggctgagccggaagctgatcaacggcatccgggacaagcagagcggcaagaccatcctggacttcctgaaatccgacggcttcgccaaccggaacttcatgcagctgatccacgacgacagcctgaccttcaaggaggacatccagaaggcccaggtgagcggccagggcgacagcctgcacgagcacatcgccaacctggccggcagccccgccatcaagaagggcatcctgcagaccgtgaaggtggtggacgagctggtgaaggtgatgggccggcacaagcccgagaacatcgtgatcgagatggcccgggagaaccagaccacccagaagggccagaagaacagccgggagcggatgaagcggatcgaggagggcatcaaggagctgggcagccagatcctgaaggagcaccccgtggagaacacccagctgcagaacgagaagctgtacctgtactacctgcagaacggccgggacatgtacgtggaccaggagctggacatcaaccggctgagcgactacgacgtggccgccatcgtgccccagagcttcctgaaggacgacagcatcgacaacaaggtgctgacccggagcgacaaggcccggggcaagagcgacaacgtgcccagcgaggaggtggtgaagaagatgaagaactactggcggcagctgctgaacgccaagctgatcacccagcggaagttcgacaacctgaccaaggccgagcggggcggcctgagcgagctggacaaggccggcttcatcaagcggcagctggtggagacccggcagatcaccaagcacgtggcccagatcctggacagccggatgaacaccaagtacgacgagaacgacaagctgatccgggaggtgaaggtgatcaccctgaaatccaagctggtgagcgacttccggaaggacttccagttctacaaggtgcgggagatcaacaactaccaccacgcccacgacgcctacctgaacgccgtggtgggcaccgccctgatcaagaagtaccccaagctggagagcgagttcgtgtacggcgactacaaggtgtacgacgtgcggaagatgatcgccaagagcgagcaggagatcggcaaggccaccgccaagtacttcttctacagcaacatcatgaacttcttcaagaccgagatcaccctggccaacggcgagatccggaagcggcccctgatcgagaccaacggcgagaccggcgagatcgtgtgggacaagggccgggacttcgccaccgtgcggaaggtgctgagcatgccccaggtgaacatcgtgaagaaaaccgaggtgcagaccggcggcttcagcaaggagagcatcctgcccaagcggaacagcgacaagctgatcgcccggaagaaggactgggaccccaagaagtacggcggcttcgacagccccaccgtggcctacagcgtgctggtggtggccaaggtggagaagggcaagagcaagaagctgaaatccgtgaaggagctgctgggcatcaccatcatggagcggagcagcttcgagaagaaccccatcgacttcctggaggccaagggctacaaggaggtgaagaaggacctgatcatcaagctgcccaagtacagcctgttcgagctggagaacggccggaagcggatgctggccagcgccggcgagctgcagaagggcaacgagctggccctgcccagcaagtacgtgaacttcctgtacctggccagccactacgagaagctgaagggcagccccgaggacaacgagcagaagcagctgttcgtggagcagcacaagcactacctggacgagatcatcgagcagatcagcgagttcagcaagcgggtgatcctggccgacgccaacctggacaaggtgctgagcgcctacaacaagcaccgggacaagcccatccgggagcaggccgagaacatcatccacctgttcaccctgaccaacctgggcgcccccgccgccttcaagtacttcgacaccaccatcgaccggaagcggtacaccagcaccaaggaggtgctggacgccaccctgatccaccagagcatcaccggcctgtacgagacccggatcgacctgagccagctgggcggcgac

SEQ ID NO: 46 - protein, 1367 aa, Artificial Sequence
  Description of Artificial Sequence: Synthetic polypeptide
DKKYSIGLAIGTNSVGWAVITDEYKVPSKKFKVLGNTDRHSIKKNLIGALLFDSGETAEATRLKRTARRRYTRRKNRICYLQEIFSNEMAKVDDSFFHRLEESFLVEEDKKHERHPIFGNIVDEVAYHEKYPTIYHLRKKLVDSTDKADLRLIYLALAHMIKFRGHFLIEGDLNPDNSDVDKLFIQLVQTYNQLFEENPINASGVDAKAILSARLSKSRRLENLIAQLPGEKKNGLFGNLIALSLGLTPNFKSNFDLAEDAKLQLSKDTYDDDLDNLLAQIGDQYADLFLAAKNLSDAILLSDILRVNTEITKAPLSASMIKRYDEHHQDLTLLKALVRQQLPEKYKEIFFDQSKNGYAGYIDGGASQEEFYKFIKPILEKMDGTEELLVKLNREDLLRKQRTFDNGSIPHQIHLGELHAILRRQEDFYPFLKDNREKIEKILTFRIPYYVGPLARGNSRFAWMTRKSEETITPWNFEEVVDKGASAQSFIERMTNFDKNLPNEKVLPKHSLLYEYFTVYNELTKVKYVTEGMRKPAFLSGEQKKAIVDLLFKTNRKVTVKQLKEDYFKKIECFDSVEISGVEDRFNASLGTYHDLLKIIKDKDFLDNEENEDILEDIVLTLTLFEDREMIEERLKTYAHLFDDKVMKQLKRRRYTGWGRLSRKLINGIRDKQSGKTILDFLKSDGFANRNFMQLIHDDSLTFKEDIQKAQVSGQGDSLHEHIANLAGSPAIKKGILQTVKVVDELVKVMGRHKPENIVIEMARENQTTQKGQKNSRERMKRIEEGIKELGSQILKEHPVENTQLQNEKLYLYYLQNGRDMYVDQELDINRLSDYDVAAIVPQSFLKDDSIDNKVLTRSDKARGKSDNVPSEEVVKKMKNYWRQLLNAKLITQRKFDNLTKAERGGLSELDKAGFIKRQLVETRQITKHVAQILDSRMNTKYDENDKLIREVKVITLKSKLVSDFRKDFQFYKVREINNYHHAHDAYLNAVVGTALIKKYPKLESEFVYGDYKVYDVRKMIAKSEQEIGKATAKYFFYSNIMNFFKTEITLANGEIRKRPLIETNGETGEIVWDKGRDFATVRKVLSMPQVNIVKKTEVQTGGFSKESILPKRNSDKLIARKKDWDPKKYGGFDSPTVAYSVLVVAKVEKGKSKKLKSVKELLGITIMERSSFEKNPIDFLEAKGYKEVKKDLIIKLPKYSLFELENGRKRMLASAGELQKGNELALPSKYVNFLYLASHYEKLKGSPEDNEQKQLFVEQHKHYLDEIIEQISEFSKRVILADANLDKVLSAYNKHRDKPIREQAENIIHLFTLTNLGAPAAFKYFDTTIDRKRYTSTKEVLDATLIHQSITGLYETRIDLSQLGGD

SEQ ID NO: 47 - DNA, 1155 bp, Unknown
  Description of Unknown: MQ1 repressor domain sequence
agcaaggtggagaacaagaccaagaagctgcgggtgttcgaggccttcgccggcatcggcgcccagcggaaggccctggagaaggtgcggaaggacgagtacgagatcgtgggcctggccgagtggtacgtgcccgccatcgtgatgtaccaggccatccacaacaacttccacaccaagctggagtacaagagcgtgagccgggaggagatgatcgactacctggagaacaagaccctgagctggaacagcaagaaccccgtgagcaacggctactggaagcggaagaaggacgacgagctgaagatcatctacaacgccatcaagctgagcgagaaggagggcaacatcttcgacatccgggacctgtacaagcggaccctgaagaacatcgacctgctgacctacagcttcccctgccaggacctgagccagcagggcatccagaagggcatgaagcggggcagcggcacccggagcggcctgctgtgggagatcgagcgggccctggacagcaccgagaagaacgacctgcccaagtacctgctgatggagaacgtgggcgccctgctgcacaagaagaacgaggaggagctgaaccagtggaagcagaagctggagagcctgggctaccagaacagcatcgaggtgctgaacgccgccgacttcggcagcagccaggcccggcggcgggtgttcatgatcagcaccctgaacgagttcgtggagctgcccaagggcgacaagaagcccaagagcatcaagaaggtgctgaacaagatcgtgagcgagaaggacatcctgaacaacctgctgaagtacaacctgaccgagttcaagaaaaccaagagcaacatcaacaaggccagcctgatcggctacagcaagttcaacagcgagggctacgtgtacgaccccgagttcaccggccccaccctgaccgccagcggcgccaacagccggatcaagatcaaggacggcagcaacatccggaagatgaacagcgacgagaccttcctgtacatcggcttcgacagccaggacggcaagcgggtgaacgagatcgagttcctgaccgagaaccagaagatcttcgtgtgcggcaacagcatcagcgtggaggtgctggaggccatcatcgacaagatcggcggc

SEQ ID NO: 48 - DNA, 1440 bp, Unknown
  Description of Unknown: DNMT1 sequence
gtggatctgaggacactcgacgtgtttagcggatgcggcggactctccgaaggcttccaccaagccggaatttccgacacactctgggccattgagatgtgggaccccgccgctcaagccttcagactgaataatcccggctccaccgtgttcaccgaggactgcaacattctgctgaagctggtgatggctggcgaaaccaccaactctagaggccagaggctgccccagaagggagatgtggaaatgctctgtggaggccctccttgccaaggcttctccggcatgaacaggttcaactctagaacatacagcaagttcaagaactctctggtcgtgagctttctgagctactgcgactactatagacctaggttctttctgctggagaacgtgagaaatttcgtgtccttcaagaggagcatggtgctgaagctgacactgaggtgtctggtgaggatgggctaccagtgcacattcggagtgctgcaagctggccagtacggcgtggcccagaccagaaggagggccatcattctggctgctgcccccggcgagaaactccctctgttccccgagcccctccacgtgttcgcccctagagcttgccagctgagcgtggtggtcgacgataagaagttcgtgagcaacatcacaaggctgtccagcggacccttcagaaccattaccgtgagggataccatgtccgacctccccgaggtgaggaatggcgccagcgctctggagatttcctacaacggcgaacctcagagctggttccaaaggcagctgagaggcgctcagtatcagcccattctgagggaccacatctgcaaagatatgagcgctctggtggccgctagaatgagacatattcctctggcccccggcagcgactggagagatctgcccaatattgaggtgagactcagcgacggaacaatggctagaaaactgaggtacacccatcatgatagaaagaacggaaggagcagcagcggcgctctgagaggagtgtgtagctgcgtggaagctggcaaggcttgcgatcccgccgctaggcagttcaataccctcatcccttggtgtctgcctcacaccggcaacagacacaatcattgggctggactgtatggaaggctcgaatgggacggctttttcagcaccaccgtgaccaatcccgaacctatgggcaagcaaggaagggtgctccaccccgagcagcatagagtcgtgtccgtgagagaatgcgctagaagccaaggcttccccgacacctatagactgttcggcaacattctggataagcacagacaagtgggaaatgctgtccctcctcctctggccaaggctatcggactggagatcaagctgtgtatgctcgccaaagctagggagagcgcttccgccaagattaaggaggaggaggccgccaaggac

SEQ ID NO: 49 - DNA, 1626 bp, Unknown
  Description of Unknown: DNMT3a/3L sequence
aaccacgaccaggagttcgacccccccaaggtgtacccccccgtgcccgccgagaagcggaagcccatccgggtgctgagcctgttcgacggcatcgccaccggcctgctggtgctgaaggacctgggcatccaggtggaccggtacatcgccagcgaggtgtgcgaggacagcatcaccgtgggcatggtgcggcaccagggcaagatcatgtacgtgggcgacgtgcggagcgtgacccagaagcacatccaggagtggggccccttcgacctggtgatcggcggcagcccctgcaacgacctgagcatcgtgaaccccgcccggaagggcctgtacgagggcaccggccggctgttcttcgagttctaccggctgctgcacgacgcccggcccaaggagggcgacgaccggcccttcttctggctgttcgagaacgtggtggccatgggcgtgagcgacaagcgggacatcagccggttcctggagagcaaccccgtgatgatcgacgccaaggaggtgagcgccgcccaccgggcccggtacttctggggcaacctgcccggcatgaaccggcccctggccagcaccgtgaacgacaagctggagctgcaggagtgcctggagcacggccggatcgccaagttcagcaaggtgcggaccatcaccacccggagcaacagcatcaagcagggcaaggaccagcacttccccgtgttcatgaacgagaaggaggacatcctgtggtgcaccgagatggagcgggtgttcggcttccccgtgcactacaccgacgtgagcaacatgagccggctggcccggcagcggctgctgggccggagctggagcgtgcccgtgatccggcacctgttcgcccccctgaaggagtacttcgcctgcgtgagcagcggcaacagcaacgccaacagccggggccccagcttcagcagcggcctggtgcccctgagcctgcggggcagccacatgaatcctctggagatgttcgagacagtgcccgtgtggagaaggcaacccgtgagggtgctgagcctcttcgaggacattaagaaggagctgacctctctgggctttctggaatccggcagcgaccccggccagctgaaacacgtggtggacgtgaccgacacagtgaggaaggacgtggaagagtggggcccctttgacctcgtgtatggagccacacctcctctcggccacacatgcgataggcctcccagctggtatctcttccagttccacagactgctccagtacgccagacctaagcccggcagccccagacccttcttctggatgttcgtggacaatctggtgctgaacaaggaggatctggatgtggccagcagatttctggagatggaacccgtgacaatccccgacgtgcatggcggctctctgcagaacgccgtgagagtgtggtccaacatccccgccattagaagcagacactgggctctggtgagcgaggaggaactgtctctgctggcccagaataagcagtcctccaagctggccgccaagtggcccaccaagctggtgaagaactgctttctgcctctgagggagtatttcaagtatttcagcaccgaactgaccagcagcctg

SEQ ID NO: 50 - DNA, 1629 bp, Unknown
  Description of Unknown: DNMT3a/3L sequence
aaccacgaccaggagttcgacccccccaaggtgtacccccccgtgcccgccgagaagcggaagcccatccgggtgctgagcctgttcgacggcatcgccaccggcctgctggtgctgaaggacctgggcatccaggtggaccggtacatcgccagcgaggtgtgcgaggacagcatcaccgtgggcatggtgcggcaccagggcaagatcatgtacgtgggcgacgtgcggagcgtgacccagaagcacatccaggagtggggccccttcgacctggtgatcggcggcagcccctgcaacgacctgagcatcgtgaaccccgcccggaagggcctgtacgagggcaccggccggctgttcttcgagttctaccggctgctgcacgacgcccggcccaaggagggcgacgaccggcccttcttctggctgttcgagaacgtggtggccatgggcgtgagcgacaagcgggacatcagccggttcctggagagcaaccccgtgatgatcgacgccaaggaggtgagcgccgcccaccgggcccggtacttctggggcaacctgcccggcatgaaccggcccctggccagcaccgtgaacgacaagctggagctgcaggagtgcctggagcacggccggatcgccaagttcagcaaggtgcggaccatcaccacccggagcaacagcatcaagcagggcaaggaccagcacttccccgtgttcatgaacgagaaggaggacatcctgtggtgcaccgagatggagcgggtgttcggcttccccgtgcactacaccgacgtgagcaacatgagccggctggcccggcagcggctgctgggccggagctggagcgtgcccgtgatccggcacctgttcgcccccctgaaggagtacttcgcctgcgtgagcagcggcaacagcaacgccaacagccggggccccagcttcagcagcggcctggtgcccctgagcctgcggggcagccacatgggccccatggagatctacaagaccgtgagcgcctggaagcggcagcccgtgcgggtgctgagcctgttccggaacatcgacaaggtgctgaaatccctgggcttcctggagagcggcagcggcagcggcggcggcaccctgaagtacgtggaggacgtgaccaacgtggtgcggcgggacgtggagaagtggggccccttcgacctggtgtacggcagcacccagcccctgggcagcagctgcgaccggtgccccggctggtacatgttccagttccaccggatcctgcagtacgccctgccccggcaggagagccagcggcccttcttctggatcttcatggacaacctgctgctgaccgaggacgaccaggagaccaccacccggttcctgcagaccgaggccgtgaccctgcaggacgtgcggggccgggactaccagaacgccatgcgggtgtggagcaacatccccggcctgaaatccaagcacgcccccctgacccccaaggaggaggagtacctgcaggcccaggtgcggagccggagcaagctggacgcccccaaggtggacctgctggtgaagaactgcctgctgcccctgcgggagtacttcaagtacttcagccagaacagcctgcccctg

SEQ ID NO: 51 - DNA, 288 bp, Unknown
  Description of Unknown: KRAB sequence
gacgccaagagcctgaccgcctggagccggaccctggtgaccttcaaggacgtgttcgtggacttcacccgggaggagtggaagctgctggacaccgcccagcagatcctgtaccggaacgtgatgctggagaactacaagaacctggtgagcctgggctaccagctgaccaagcccgacgtgatcctgcggctggagaagggcgaggagccctggctggtggagcgggagatccaccaggagacccaccccgacagcgagaccgccttcgagatcaagagcagcgtg

SEQ ID NO: 52 - DNA, 846 bp, Unknown
  Description of Unknown: G9A sequence
ggaaatagggctatcagaaccgagaagatcatctgtagggacgtggctagaggctacgagaacgtgcccattccttgcgtgaatggcgtggatggcgaaccttgccccgaggactacaaatacatctccgagaactgcgaaaccagcacaatgaacatcgacagaaacatcacccacctccagcactgcacatgtgtggatgactgctcctccagcaactgtctgtgcggccagctctccatcagatgctggtacgacaaggacggcagactgctgcaagagttcaacaagatcgaaccccctctcatcttcgagtgtaaccaagcttgcagctgctggagaaactgcaagaatagagtggtccagagcggcatcaaggtgagactgcaactgtacagaaccgccaagatgggatggggagtgagggctctgcaaaccattccccaaggcaccttcatctgcgaatacgtgggcgaactgatctccgacgccgaagctgacgtgagagaggacgacagctatctcttcgatctggacaataaggacggcgaggtgtactgcatcgacgctagatattacggcaacatctctagattcatcaaccacctctgcgatcccaacatcattcccgtgagggtgttcatgctgcaccaagatctgaggttccctagaatcgccttcttcagctctagagacatcagaaccggcgaggagctgggcttcgattacggcgatagattctgggacatcaagtccaagtacttcacatgccagtgcggcagcgagaagtgtaagcacagcgctgaggccattgctctggagcagtctagactggccagactggat

SEQ ID NO: 53 - DNA, 1128 bp, Unknown
  Description of Unknown: HDAC8 sequence
gaggagcccgaggagcccgccgatagcggacaatctctggtgcccgtctacatctacagccccgaatatgtgagcatgtgtgattccctcgccaagatccctaagagagccagcatggtgcattctctgatcgaggcctacgctctgcataagcaaatgaggatcgtgaagcccaaggtcgccagcatggaagagatggccacctttcacaccgatgcctacctccaacatctccagaaggtgtcccaagagggcgacgacgaccaccccgactccattgagtacggactgggctatgattgccccgccaccgagggcatctttgactatgccgccgctatcggcggagctaccatcacagccgcccagtgtctgattgatggcatgtgcaaggtcgccatcaactggtccggaggctggcatcatgccaagaaggatgaggcctccggcttctgttatctgaatgacgccgtgctgggcattctgagactgaggaggaaattcgagaggattctgtacgtggatctggatctgcatcacggagatggagtcgaagatgccttcagcttcaccagcaaggtgatgacagtctctctgcacaagttctcccccggcttctttcccggaaccggcgacgtgtccgacgtgggactgggcaagggaaggtactacagcgtgaacgtgcccattcaagacggcatccaagacgagaagtactaccagatctgcgagtccgtgctcaaggaggtctaccaagccttcaatcctaaggctgtcgtgctccaactgggagctgataccattgctggcgatcccatgtgcagcttcaatatgacacccgtcggaatcggcaagtgcctcaagtacatcctccagtggcagctcgccaccctcattctcggaggaggcggatacaatctggctaataccgccagatgctggacctatctgaccggcgtgattctgggcaaaacactgagcagcgaaatccccgaccacgagtttttcaccgcttacggccccgactacgtgctggagatcacccccagctgcagacccgatagaaacgaaccccatagaatccagcaaattctgaactatatcaagggcaacctcaagcacgtcgtg

SEQ ID NO: 54 - DNA, 2553 bp, Unknown
  Description of Unknown: LSD1 sequence
ctctccggaaagaaagccgccgctgccgctgccgccgctgctgctgccgctaccggcacagaagctggccccggaacagctggcggaagcgaaaacggaagcgaagtggctgcccagcccgccggactgtccggacccgccgaggtgggacccggcgctgtcggcgaaaggacccccagaaaaaaggagcctcctagagccagccctcccggcggactcgccgaacctcccggcagcgctggacctcaagccggacctacagtggtgcccggcagcgctacacctatggagaccggcatcgctgagacccccgagggaaggagaaccagcagaaggaagagagccaaggtggagtacagagagatggatgagtctctggctaacctcagcgaggacgagtactactccgaggaggaaaggaatgccaaggccgagaaggagaagaagctgccccctcctccccctcaagccccccccgaggaggagaacgagtccgagcccgaggaacccagcggagtggaaggagccgcctttcagtccagactgccccacgacagaatgacatcccaagaggccgcttgctttcccgacattatttccggccctcagcagacccagaaggtgtttctgttcattagaaatagaacactccagctgtggctcgacaaccccaagatccagctgaccttcgaggctaccctccaacagctggaggccccctacaatagcgataccgtgctggtgcacagagtgcacagctatctggagaggcacggcctcattaacttcggcatttacaagcggatcaagcccctgcccaccaagaaaacaggcaaggtgatcatcatcggcagcggcgtgagcggcctggccgccgcccggcagctgcagagcttcggcatggacgtgaccctgctggaggcccgggaccgggtgggcggccgggtggccaccttccggaagggcaactacgtggccgacctgggcgccatggtggtgaccggcctgggcggcaaccccatggccgtggtgagcaagcaggtgaacatggagctggccaagatcaagcagaagtgccccctgtacgaggccaacggccaggccgtgcccaaggagaaggacgagatggtggagcaggagttcaaccggctgctggaggccaccagctacctgagccaccagctggacttcaacgtgctgaacaacaagcacgtgagcctgggccaggccctggaggtggtgatccagctgcaggagaagcacgtgaaggacgagcagatcgagcactggaagaagatcgtgaaaacacaggaggagctgaaggagctgctgaacaagatggtgaacctgaaggagaagatcaaggagctgcaccagcagtacaaggaggccagcgaggtgaagcccccccgggacatcaccgccgagttcctggtcaaaagcaagcaccgggacctgaccgccctgtgcaaggagtacgacgagctggccgagacccagggcaagctggaggagaagctgcaggagctggaggccaacccccccagcgacgtgtacctgagcagccgggaccggcagatcctggactggcacttcgccaacctggagttcgccaacgccacccccctgagcaccctgagcctgaagcactgggaccaggacgacgacttcgagttcaccggcagccacctgaccgtgcggaacggctacagctgcgtgcccgtggccctggccgagggcctggacatcaagctgaacaccgccgtgcggcaggtgcggtacaccgccagcggctgcgaggtgatcgccgtgaacacccggagcaccagccagaccttcatctacaagtgcgacgccgtgctgtgcaccctgcccctgggcgtgctgaagcagcagccccccgccgtgcagttcgtgccccccctgcccgagtggaaaacaagcgccgtgcagcggatgggcttcggcaacctgaacaaggtggtgctgtgcttcgaccgggtgttctgggaccccagcgtgaacctgttcggccacgtgggcagcaccaccgccagccggggcgagctgttcctgttctggaacctgtacaaggcccccatcctgctggccctggtggccggcgaggccgccggcatcatggagaacatcagcgacgacgtgatcgtgggccggtgcctggccatcctgaagggcatcttcggcagcagcgccgtgccccagcccaaggagaccgtggtgagccggtggcgggccgacccctgggcccggggcagctacagctacgtggccgccggcagcagcggcaacgactacgacctgatggcccagcccatcacccccggccccagcatccccggcgccccccagcccatcccccggctgttcttcgccggcgagcacaccatccggaactaccccgccaccgtgcacggcgccctgctgagcggcctgcgggaggcaggacggatcgccgaccagttcctgggcgccatgtacaccctgccccggcaggccacccccggcgtgcccgcccagcagagccccagcatg

SEQ ID NO: 55 - DNA, 2235 bp, Unknown
  Description of Unknown: EZH2 sequence
ggccagaccggcaagaagagcgagaagggccccgtgtgctggcggaagcgggtgaagagcgagtacatgcggctgcggcagctgaagcggttccggcgggccgacgaggtgaagagcatgttcagcagcaaccggcagaagatcctggagcggaccgagatcctgaaccaggagtggaagcagcggcgaatccagcccgtgcacatcctgaccagcgtgagcagcctgcggggcacccgggagtgcagcgtgaccagcgacctggacttccccacccaggtgatccccctaaagaccctgaacgccgtggccagcgtgcccatcatgtacagctggagccccctgcagcagaacttcatggtggaggacgagaccgtgctgcacaacatcccctacatgggcgacgaggtgctggaccaggacggcaccttcatcgaggagctgatcaagaactacgacggcaaggtgcacggcgaccgggagtgcggcttcatcaacgacgagatcttcgtggagctggtgaacgccctgggccagtacaacgacgacgacgacgacgacgacggcgacgaccccgaggagcgggaggagaagcagaaggacctggaggaccaccgggacgacaaggagagccggcccccccggaagttccccagcgacaagatcttcgaggccatcagcagcatgttccccgacaagggcaccgccgaggagctgaaggagaagtacaaggagctgaccgagcagcagctgcccggcgccctgccccccgagtgcacccccaacatcgacggccccaacgccaagagcgtgcagcgggagcagagcctgcacagcttccacaccctgttctgccggcggtgcttcaagtacgactgcttcctgcaccccttccacgccacccccaacacctacaagcggaagaacaccgagaccgccctggacaacaagccctgcggcccccagtgctaccagcacctggagggcgccaaggagttcgccgccgccctgaccgccgagcggatcaagaccccccccaagcggcccggcggccggcggcggggccggctgcccaacaacagcagccggcccagcacccccaccatcaacgtgctggagagcaaggacaccgacagcgaccgggaggccggcaccgagaccggcggcgagaacaacgacaaggaggaggaggagaagaaggacgagaccagcagcagcagcgaggccaacagccggtgccagacccccatcaagatgaagcccaacatcgagccccccgagaacgtggagtggagcggcgccgaggccagcatgttccgggtgctgatcggcacctactacgacaacttctgcgccatcgcccggctgatcggcaccaagacctgccggcaggtgtacgagttccgggtgaaggagagcagcatcatcgcccccgcccccgccgaggacgtggacacccccccccggaagaagaagcggaagcaccggctgtgggccgcccactgccggaagatccagctgaagaaggacggcagcagcaaccacgtgtacaactaccagccctgcgaccacccccggcagccctgcgacagcagctgcccctgcgtgatcgcccagaacttctgcgagaagttctgccagtgcagcagcgagtgccagaaccggttccccggctgccggtgcaaggcccagtgcaacaccaagcagtgcccctgctacctggccgtgcgggagtgcgaccccgacctgtgcctgacctgcggcgccgccgaccactgggacagcaagaacgtgagctgcaagaactgcagcatccagcggggcagcaagaagcacctgctgctggcccccagcgacgtggccggctggggcatcttcatcaaggaccccgtgcagaagaacgagttcatcagcgagtactgcggcgagatcatcagccaggacgaggccgaccggcggggcaaggtgtacgacaagtacatgtgcagcttcctgttcaacctgaacaacgacttcgtggtggacgccacccggaagggcaacaagatccggttcgccaaccacagcgtgaaccccaactgctacgccaaggtgatgatggtgaacggcgaccaccggatcggcatcttcgccaagcgggccatccagaccggcgaggagctgttcttcgactaccggtacagccaggccgacgccctgaagtacgtgggcatcgagcgggagatggagatcccc

SEQ ID NO: 56 - DNA, 132 bp, Unknown
  Description of Unknown: FOG1 sequence
agcagaaggaagcagagcaaccccagacaaatcaagagatctctgggcgacatggaggccagagaggaagtgcagctggtgggcgccagccacatggagcagaaggctacagcccccgaggcccccagcccc

SEQ ID NO: 57 - protein, 385 aa, Spiroplasma monobiae
SKVENKTKKLRVFEAFAGIGAQRKALEKVRKDEYEIVGLAEWYVPAIVMYQAIHNNFHTKLEYKSVSREEMIDYLENKTLSWNSKNPVSNGYWKRKKDDELKIIYNAIKLSEKEGNIFDIRDLYKRTLKNIDLLTYSFPCQDLSQQGIQKGMKRGSGTRSGLLWEIERALDSTEKNDLPKYLLMENVGALLHKKNEEELNQWKQKLESLGYQNSIEVLNAADFGSSQARRRVFMISTLNEFVELPKGDKKPKSIKKVLNKIVSEKDILNNLLKYNLTEFKKTKSNINKASLIGYSKFNSEGYVYDPEFTGPTLTASGANSRIKIKDGSNIRKMNSDETFLYIGFDSQDGKRVNEIEFLTENQKIFVCGNSISVEVLEAIIDKIGG

SEQ ID NO: 58 - protein, 480 aa, Unknown
  Description of Unknown: DNMT1 sequence
VDLRTLDVFSGCGGLSEGFHQAGISDTLWAIEMWDPAAQAFRLNNPGSTVFTEDCNILLKLVMAGETTNSRGQRLPQKGDVEMLCGGPPCQGFSGMNRFNSRTYSKFKNSLVVSFLSYCDYYRPRFFLLENVRNFVSFKRSMVLKLTLRCLVRMGYQCTFGVLQAGQYGVAQTRRRAIILAAAPGEKLPLFPEPLHVFAPRACQLSVVVDDKKFVSNITRLSSGPFRTITVRDTMSDLPEVRNGASALEISYNGEPQSWFQRQLRGAQYQPILRDHICKDMSALVAARMRHIPLAPGSDWRDLPNIEVRLSDGTMARKLRYTHHDRKNGRSSSGALRGVCSCVEAGKACDPAARQFNTLIPWCLPHTGNRHNHWAGLYGRLEWDGFFSTTVTNPEPMGKQGRVLHPEQHRVVSVRECARSQGFPDTYRLFGNILDKHRQVGNAVPPPLAKAIGLEIKLCMLAKARESASAKIKEEEAAKD

SEQ ID NO: 59 - protein, 542 aa, Unknown
  Description of Unknown: DNMT3a/3L sequence
NHDQEFDPPKVYPPVPAEKRKPIRVLSLFDGIATGLLVLKDLGIQVDRYIASEVCEDSITVGMVRHQGKIMYVGDVRSVTQKHIQEWGPFDLVIGGSPCNDLSIVNPARKGLYEGTGRLFFEFYRLLHDARPKEGDDRPFFWLFENVVAMGVSDKRDISRFLESNPVMIDAKEVSAAHRARYFWGNLPGMNRPLASTVNDKLELQECLEHGRIAKFSKVRTITTRSNSIKQGKDQHFPVFMNEKEDILWCTEMERVFGFPVHYTDVSNMSRLARQRLLGRSWSVPVIRHLFAPLKEYFACVSSGNSNANSRGPSFSSGLVPLSLRGSHMNPLEMFETVPVWRRQPVRVLSLFEDIKKELTSLGFLESGSDPGQLKHVVDVTDTVRKDVEEWGPFDLVYGATPPLGHTCDRPPSWYLFQFHRLLQYARPKPGSPRPFFWMFVDNLVLNKEDLDVASRFLEMEPVTIPDVHGGSLQNAVRVWSNIPAIRSRHWALVSEEELSLLAQNKQSSKLAAKWPTKLVKNCFLPLREYFKYFSTELTSSL

SEQ ID NO: 60 - protein, 543 aa, Unknown
  Description of Unknown: DNMT3a/3L sequence
NHDQEFDPPKVYPPVPAEKRKPIRVLSLFDGIATGLLVLKDLGIQVDRYIASEVCEDSITVGMVRHQGKIMYVGDVRSVTQKHIQEWGPFDLVIGGSPCNDLSIVNPARKGLYEGTGRLFFEFYRLLHDARPKEGDDRPFFWLFENVVAMGVSDKRDISRFLESNPVMIDAKEVSAAHRARYFWGNLPGMNRPLASTVNDKLELQECLEHGRIAKFSKVRTITTRSNSIKQGKDQHFPVFMNEKEDILWCTEMERVFGFPVHYTDVSNMSRLARQRLLGRSWSVPVIRHLFAPLKEYFACVSSGNSNANSRGPSFSSGLVPLSLRGSHMGPMEIYKTVSAWKRQPVRVLSLFRNIDKVLKSLGFLESGSGSGGGTLKYVEDVTNVVRRDVEKWGPFDLVYGSTQPLGSSCDRCPGWYMFQFHRILQYALPRQESQRPFFWIFMDNLLLTEDDQETTTRFLQTEAVTLQDVRGRDYQNAMRVWSNIPGLKSKHAPLTPKEEEYLQAQVRSRSKLDAPKVDLLVKNCLLPLREYFKYFSQNSLPL

SEQ ID NO: 61 - protein, 96 aa, Unknown
  Description of Unknown: KRAB sequence
DAKSLTAWSRTLVTFKDVFVDFTREEWKLLDTAQQILYRNVMLENYKNLVSLGYQLTKPDVILRLEKGEEPWLVEREIHQETHPDSETAFEIKSSV

SEQ ID NO: 62 - protein, 282 aa, Homo sapiens
GNRAIRTEKIICRDVARGYENVPIPCVNGVDGEPCPEDYKYISENCETSTMNIDRNITHLQHCTCVDDCSSSNCLCGQLSIRCWYDKDGRLLQEFNKIEPPLIFECNQACSCWRNCKNRVVQSGIKVRLQLYRTAKMGWGVRALQTIPQGTFICEYVGELISDAEADVREDDSYLFDLDNKDGEVYCIDARYYGNISRFINHLCDPNIIPVRVFMLHQDLRFPRIAFFSSRDIRTGEELGFDYGDRFWDIKSKYFTCQCGSEKCKHSAEAIALEQSRLARLD

SEQ ID NO: 63 - protein, 376 aa, Homo sapiens
EEPEEPADSGQSLVPVYIYSPEYVSMCDSLAKIPKRASMVHSLIEAYALHKQMRIVKPKVASMEEMATFHTDAYLQHLQKVSQEGDDDHPDSIEYGLGYDCPATEGIFDYAAAIGGATITAAQCLIDGMCKVAINWSGGWHHAKKDEASGFCYLNDAVLGILRLRRKFERILYVDLDLHHGDGVEDAFSFTSKVMTVSLHKFSPGFFPGTGDVSDVGLGKGRYYSVNVPIQDGIQDEKYYQICESVLKEVYQAFNPKAVVLQLGADTIAGDPMCSFNMTPVGIGKCLKYILQWQLATLILGGGGYNLANTARCWTYLTGVILGKTLSSEIPDHEFFTAYGPDYVLEITPSCRPDRNEPHRIQQILNYIKGNLKHVV

SEQ ID NO: 64 - protein, 851 aa, Homo sapiens
LSGKKAAAAAAAAAAAATGTEAGPGTAGGSENGSEVAAQPAGLSGPAEVGPGAVGERTPRKKEPPRASPPGGLAEPPGSAGPQAGPTVVPGSATPMETGIAETPEGRRTSRRKRAKVEYREMDESLANLSEDEYYSEEERNAKAEKEKKLPPPPPQAPPEEENESEPEEPSGVEGAAFQSRLPHDRMTSQEAACFPDIISGPQQTQKVFLFIRNRTLQLWLDNPKIQLTFEATLQQLEAPYNSDTVLVHRVHSYLERHGLINFGIYKRIKPLPTKKTGKVIIIGSGVSGLAAARQLQSFGMDVTLLEARDRVGGRVATFRKGNYVADLGAMVVTGLGGNPMAVVSKQVNMELAKIKQKCPLYEANGQAVPKEKDEMVEQEFNRLLEATSYLSHQLDFNVLNNKHVSLGQALEVVIQLQEKHVKDEQIEHWKKIVKTQEELKELLNKMVNLKEKIKELHQQYKEASEVKPPRDITAEFLVKSKHRDLTALCKEYDELAETQGKLEEKLQELEANPPSDVYLSSRDRQILDWHFANLEFANATPLSTLSLKHWDQDDDFEFTGSHLTVRNGYSCVPVALAEGLDIKLNTAVRQVRYTASGCEVIAVNTRSTSQTFIYKCDAVLCTLPLGVLKQQPPAVQFVPPLPEWKTSAVQRMGFGNLNKVVLCFDRVFWDPSVNLFGHVGSTTASRGELFLFWNLYKAPILLALVAGEAAGIMENISDDVIVGRCLAILKGIFGSSAVPQPKETVVSRWRADPWARGSYSYVAAGSSGNDYDLMAQPITPGPSIPGAPQPIPRLFFAGEHTIRNYPATVHGALLSGLREAGRIADQFLGAMYTLPRQATPGVPAQQSPSM

SEQ ID NO: 65 - protein, 745 aa, Homo sapiens
GQTGKKSEKGPVCWRKRVKSEYMRLRQLKRFRRADEVKSMFSSNRQKILERTEILNQEWKQRRIQPVHILTSVSSLRGTRECSVTSDLDFPTQVIPLKTLNAVASVPIMYSWSPLQQNFMVEDETVLHNIPYMGDEVLDQDGTFIEELIKNYDGKVHGDRECGFINDEIFVELVNALGQYNDDDDDDDGDDPEEREEKQKDLEDHRDDKESRPPRKFPSDKIFEAISSMFPDKGTAEELKEKYKELTEQQLPGALPPECTPNIDGPNAKSVQREQSLHSFHTLFCRRCFKYDCFLHPFHATPNTYKRKNTETALDNKPCGPQCYQHLEGAKEFAAALTAERIKTPPKRPGGRRRGRLPNNSSRPSTPTINVLESKDTDSDREAGTETGGENNDKEEEEKKDETSSSSEANSRCQTPIKMKPNIEPPENVEWSGAEASMFRVLIGTYYDNFCAIARLIGTKTCRQVYEFRVKESSIIAPAPAEDVDTPPRKKKRKHRLWAAHCRKIQLKKDGSSNHVYNYQPCDHPRQPCDSSCPCVIAQNFCEKFCQCSSECQNRFPGCRCKAQCNTKQCPCYLAVRECDPDLCLTCGAADHWDSKNVSCKNCSIQRGSKKHLLLAPSDVAGWGIFIKDPVQKNEFISEYCGEIISQDEADRRGKVYDKYMCSFLFNLNNDFVVDATRKGNKIRFANHSVNPNCYAKVMMVNGDHRIGIFAKRAIQTGEELFFDYRYSQADALKYVGIEREMEIP

SEQ ID NO: 66 - protein, 44 aa, Homo sapiens
SRRKQSNPRQIKRSLGDMEAREEVQLVGASHMEQKATAPEAPSP

SEQ ID NO: 67 - protein, 1497 aa, Artificial Sequence
  Description of Artificial Sequence: Synthetic polypeptide
MAPKKKRKVGIHGVPAAAKRNYILGLAIGITSVGYGIIDYETRDVIDAGVRLFKEANVENNEGRRSKRGARRLKRRRRHRIQRVKKLLFDYNLLTDHSELSGINPYEARVKGLSQKLSEEEFSAALLHLAKRRGVHNVNEVEEDTGNELSTKEQISRNSKALEEKYVAELQLERLKKDGEVRGSINRFKTSDYVKEAKQLLKVQKAYHQLDQSFIDTYIDLLETRRTYYEGPGEGSPFGWKDIKEWYEMLMGHCTYFPEELRSVKYAYNADLYNALNDLNNLVITRDENEKLEYYEKFQIIENVFKQKKKPTLKQIAKEILVNEEDIKGYRVTSTGKPEFTNLKVYHDIKDITARKEIIENAELLDQIAKILTIYQSSEDIQEELTNLNSELTQEEIEQISNLKGYTGTHNLSLKAINLILDELWHTNDNQIAIFNRLKLVPKKVDLSQQKEIPTTLVDDFILSPVVKRSFIQSIKVINAIIKKYGLPNDIIIELAREKNSKDAQKMINEMQKRNRQTNERIEEIIRTTGKENAKYLIEKIKLHDMQEGKCLYSLEAIPLEDLLNNPFNYEVDAIIPRSVSFDNSFNNKVLVKQEENSKKGNRTPFQYLSSSDSKISYETFKKHILNLAKGKGRISKTKKEYLLEERDINRFSVQKDFINRNLVDTRYATRGLMNLLRSYFRVNNLDVKVKSINGGFTSFLRRKWKFKKERNKGYKHHAEDALIIANADFIFKEWKKLDKAKKVMENQMFEEKQAESMPEIETEQEYKEIFITPHQIKHIKDFKDYKYSHRVDKKPNRKLINDTLYSTRKDDKGNTLIVNNLNGLYDKDNDKLKKLINKSPEKLLMYHHDPQTYQKLKLIMEQYGDEKNPLYKYYEETGNYLTKYSKKDNGPVIKKIKYYGNKLNAHLDITDDYPNSRNKVVKLSLKPYRFDVYLDNGVYKFVTVKNLDVIKKENYYEVNSKCYEEAKKLKKISNQAEFIASFYKNDLIKINGELYRVIGVNNDLLNRIEVNMIDITYREYLENMNDKRPPHIIKTIASKTQSIKKYSTDILGNLYEVKSKKHPQIIKKGKRPAATKKAGQAKKKKARDSKVENKTKKLRVFEAFAGIGAQRKALEKVRKDEYEIVGLAEWYVPAIVMYQAIHNNFHTKLEYKSVSREEMIDYLENKTLSWNSKNPVSNGYWKRKKDDELKIIYNAIKLSEKEGNIFDIRDLYKRTLKNIDLLTYSFPCQDLSQQGIQKGMKRGSGTRSGLLWEIERALDSTEKNDLPKYLLMENVGALLHKKNEEELNQWKQKLESLGYQNSIEVLNAADFGSSQARRRVFMISTLNEFVELPKGDKKPKSIKKVLNKIVSEKDILNNLLKYNLTEFKKTKSNINKASLIGYSKFNSEGYVYDPEFTGPTLTASGANSRIKIKDGSNIRKMNSDETFLYIGFDSQDGKRVNEIEFLTENQKIFVCGNSISVEVLEAIIDKIGGPSSGGKRPAATKKAGQAKKKKGS

SEQ ID NO: 68 - protein, 1811 aa, Artificial Sequence
  Description of Artificial Sequence: Synthetic polypeptide
MAPKKKRKVGIHGVPAADKKYSIGLAIGTNSVGWAVITDEYKVPSKKFKVLGNTDRHSIKKNLIGALLFDSGETAEATRLKRTARRRYTRRKNRICYLQEIFSNEMAKVDDSFFHRLEESFLVEEDKKHERHPIFGNIVDEVAYHEKYPTIYHLRKKLVDSTDKADLRLIYLALAHMIKFRGHFLIEGDLNPDNSDVDKLFIQLVQTYNQLFEENPINASGVDAKAILSARLSKSRRLENLIAQLPGEKKNGLFGNLIALSLGLTPNFKSNFDLAEDAKLQLSKDTYDDDLDNLLAQIGDQYADLFLAAKNLSDAILLSDILRVNTEITKAPLSASMIKRYDEHHQDLTLLKALVRQQLPEKYKEIFFDQSKNGYAGYIDGGASQEEFYKFIKPILEKMDGTEELLVKLNREDLLRKQRTFDNGSIPHQIHLGELHAILRRQEDFYPFLKDNREKIEKILTFRIPYYVGPLARGNSRFAWMTRKSEETITPWNFEEVVDKGASAQSFIERMTNFDKNLPNEKVLPKHSLLYEYFTVYNELTKVKYVTEGMRKPAFLSGEQKKAIVDLLFKTNRKVTVKQLKEDYFKKIECFDSVEISGVEDRFNASLGTYHDLLKIIKDKDFLDNEENEDILEDIVLTLTLFEDREMIEERLKTYAHLFDDKVMKQLKRRRYTGWGRLSRKLINGIRDKQSGKTILDFLKSDGFANRNFMQLIHDDSLTFKEDIQKAQVSGQGDSLHEHIANLAGSPAIKKGILQTVKVVDELVKVMGRHKPENIVIEMARENQTTQKGQKNSRERMKRIEEGIKELGSQILKEHPVENTQLQNEKLYLYYLQNGRDMYVDQELDINRLSDYDVAAIVPQSFLKDDSIDNKVLTRSDKARGKSDNVPSEEVVKKMKNYWRQLLNAKLITQRKFDNLTKAERGGLSELDKAGFIKRQLVETRQITKHVAQILDSRMNTKYDENDKLIREVKVITLKSKLVSDFRKDFQFYKVREINNYHHAHDAYLNAVVGTALIKKYPKLESEFVYGDYKVYDVRKMIAKSEQEIGKATAKYFFYSNIMNFFKTEITLANGEIRKRPLIETNGETGEIVWDKGRDFATVRKVLSMPQVNIVKKTEVQTGGFSKESILPKRNSDKLIARKKDWDPKKYGGFDSPTVAYSVLVVAKVEKGKSKKLKSVKELLGITIMERSSFEKNPIDFLEAKGYKEVKKDLIIKLPKYSLFELENGRKRMLASAGELQKGNELALPSKYVNFLYLASHYEKLKGSPEDNEQKQLFVEQHKHYLDEIIEQISEFSKRVILADANLDKVLSAYNKHRDKPIREQAENIIHLFTLTNLGAPAAFKYFDTTIDRKRYTSTKEVLDATLIHQSITGLYETRIDLSQLGGDKRPAATKKAGQAKKKKARDSKVENKTKKLRVFEAFAGIGAQRKALEKVRKDEYEIVGLAEWYVPAIVMYQAIHNNFHTKLEYKSVSREEMIDYLENKTLSWNSKNPVSNGYWKRKKDDELKIIYNAIKLSEKEGNIFDIRDLYKRTLKNIDLLTYSFPCQDLSQQGIQKGMKRGSGTRSGLLWEIERALDSTEKNDLPKYLLMENVGALLHKKNEEELNQWKQKLESLGYQNSIEVLNAADFGSSQARRRVFMISTLNEFVELPKGDKKPKSIKKVLNKIVSEKDILNNLLKYNLTEFKKTKSNINKASLIGYSKFNSEGYVYDPEFTGPTLTASGANSRIKIKDGSNIRKMNSDETFLYIGFDSQDGKRVNEIEFLTENQKIFVCGNSISVEVLEAIIDKIGGPSSGGKRPAATKKAGQAKKKKGS

SEQ ID NO: 69 - protein, 1913 aa, Artificial Sequence
  Description of Artificial Sequence: Synthetic polypeptide
MAPKKKRKVGIHGVPAADKKYSIGLAIGTNSVGWAVITDEYKVPSKKFKVLGNTDRHSIKKNLIGALLFDSGETAEATRLKRTARRRYTRRKNRICYLQEIFSNEMAKVDDSFFHRLEESFLVEEDKKHERHPIFGNIVDEVAYHEKYPTIYHLRKKLVDSTDKADLRLIYLALAHMIKFRGHFLIEGDLNPDNSDVDKLFIQLVQTYNQLFEENPINASGVDAKAILSARLSKSRRLENLIAQLPGEKKNGLFGNLIALSLGLTPNFKSNFDLAEDAKLQLSKDTYDDDLDNLLAQIGDQYADLFLAAKNLSDAILLSDILRVNTEITKAPLSASMIKRYDEHHQDLTLLKALVRQQLPEKYKEIFFDQSKNGYAGYIDGGASQEEFYKFIKPILEKMDGTEELLVKLNREDLLRKQRTFDNGSIPHQIHLGELHAILRRQEDFYPFLKDNREKIEKILTFRIPYYVGPLARGNSRFAWMTRKSEETITPWNFEEVVDKGASAQSFIERMTNFDKNLPNEKVLPKHSLLYEYFTVYNELTKVKYVTEGMRKPAFLSGEQKKAIVDLLFKTNRKVTVKQLKEDYFKKIECFDSVEISGVEDRFNASLGTYHDLLKIIKDKDFLDNEENEDILEDIVLTLTLFEDREMIEERLKTYAHLFDDKVMKQLKRRRYTGWGRLSRKLINGIRDKQSGKTILDFLKSDGFANRNFMQLIHDDSLTFKEDIQKAQVSGQGDSLHEHIANLAGSPAIKKGILQTVKVVDELVKVMGRHKPENIVIEMARENQTTQKGQKNSRERMKRIEEGIKELGSQILKEHPVENTQLQNEKLYLYYLQNGRDMYVDQELDINRLSDYDVAAIVPQSFLKDDSIDNKVLTRSDKARGKSDNVPSEEVVKKMKNYWRQLLNAKLITQRKFDNLTKAERGGLSELDKAGFIKRQLVETRQITKHVAQILDSRMNTKYDENDKLIREVKVITLKSKLVSDFRKDFQFYKVREINNYHHAHDAYLNAVVGTALIKKYPKLESEFVYGDYKVYDVRKMIAKSEQEIGKATAKYFFYSNIMNFFKTEITLANGEIRKRPLIETNGETGEIVWDKGRDFATVRKVLSMPQVNIVKKTEVQTGGFSKESILPKRNSDKLIARKKDWDPKKYGGFDSPTVAYSVLVVAKVEKGKSKKLKSVKELLGITIMERSSFEKNPIDFLEAKGYKEVKKDLIIKLPKYSLFELENGRKRMLASAGELQKGNELALPSKYVNFLYLASHYEKLKGSPEDNEQKQLFVEQHKHYLDEIIEQISEFSKRVILADANLDKVLSAYNKHRDKPIREQAENIIHLFTLTNLGAPAAFKYFDTTIDRKRYTSTKEVLDATLIHQSITGLYETRIDLSQLGGDSGGKRPAATKKAGQAKKKKSGGGGSVDLRTLDVFSGCGGLSEGFHQAGISDTLWAIEMWDPAAQAFRLNNPGSTVFTEDCNILLKLVMAGETTNSRGQRLPQKGDVEMLCGGPPCQGFSGMNRFNSRTYSKFKNSLVVSFLSYCDYYRPRFFLLENVRNFVSFKRSMVLKLTLRCLVRMGYQCTFGVLQAGQYGVAQTRRRAIILAAAPGEKLPLFPEPLHVFAPRACQLSVVVDDKKFVSNITRLSSGPFRTITVRDTMSDLPEVRNGASALEISYNGEPQSWFQRQLRGAQYQPILRDHICKDMSALVAARMRHIPLAPGSDWRDLPNIEVRLSDGTMARKLRYTHHDRKNGRSSSGALRGVCSCVEAGKACDPAARQFNTLIPWCLPHTGNRHNHWAGLYGRLEWDGFFSTTVTNPEPMGKQGRVLHPEQHRVVSVRECARSQGFPDTYRLFGNILDKHRQVGNAVPPPLAKAIGLEIKLCMLAKARESASAKIKEEEAAKDGGGGSGKRPAATKKAGQAKKKKGS

SEQ ID NO: 70 - protein, 1977 aa, Artificial Sequence
  Description of Artificial Sequence: Synthetic polypeptide
MAPKKKRKVGIHGVPAADKKYSIGLAIGTNSVGWAVITDEYKVPSKKFKVLGNTDRHSIKKNLIGALLFDSGETAEATRLKRTARRRYTRRKNRICYLQEIFSNEMAKVDDSFFHRLEESFLVEEDKKHERHPIFGNIVDEVAYHEKYPTIYHLRKKLVDSTDKADLRLIYLALAHMIKFRGHFLIEGDLNPDNSDVDKLFIQLVQTYNQLFEENPINASGVDAKAILSARLSKSRRLENLIAQLPGEKKNGLFGNLIALSLGLTPNFKSNFDLAEDAKLQLSKDTYDDDLDNLLAQIGDQYADLFLAAKNLSDAILLSDILRVNTEITKAPLSASMIKRYDEHHQDLTLLKALVRQQLPEKYKEIFFDQSKNGYAGYIDGGASQEEFYKFIKPILEKMDGTEELLVKLNREDLLRKQRTFDNGSIPHQIHLGELHAILRRQEDFYPFLKDNREKIEKILTFRIPYYVGPLARGNSRFAWMTRKSEETITPWNFEEVVDKGASAQSFIERMTNFDKNLPNEKVLPKHSLLYEYFTVYNELTKVKYVTEGMRKPAFLSGEQKKAIVDLLFKTNRKVTVKQLKEDYFKKIECFDSVEISGVEDRFNASLGTYHDLLKIIKDKDFLDNEENEDILEDIVLTLTLFEDREMIEERLKTYAHLFDDKVMKQLKRRRYTGWGRLSRKLINGIRDKQSGKTILDFLKSDGFANRNFMQLIHDDSLTFKEDIQKAQVSGQGDSLHEHIANLAGSPAIKKGILQTVKVVDELVKVMGRHKPENIVIEMARENQTTQKGQKNSRERMKRIEEGIKELGSQILKEHPVENTQLQNEKLYLYYLQNGRDMYVDQELDINRLSDYDVAAIVPQSFLKDDSIDNKVLTRSDKARGKSDNVPSEEVVKKMKNYWRQLLNAKLITQRKFDNLTKAERGGLSELDKAGFIKRQLVETRQITKHVAQILDSRMNTKYDENDKLIREVKVITLKSKLVSDFRKDFQFYKVREINNYHHAHDAYLNAVVGTALIKKYPKLESEFVYGDYKVYDVRKMIAKSEQEIGKATAKYFFYSNIMNFFKTEITLANGEIRKRPLIETNGETGEIVWDKGRDFATVRKVLSMPQVNIVKKTEVQTGGFSKESILPKRNSDKLIARKKDWDPKKYGGFDSPTVAYSVLVVAKVEKGKSKKLKSVKELLGITIMERSSFEKNPIDFLEAKGYKEVKKDLIIKLPKYSLFELENGRKRMLASAGELQKGNELALPSKYVNFLYLASHYEKLKGSPEDNEQKQLFVEQHKHYLDEIIEQISEFSKRVILADANLDKVLSAYNKHRDKPIREQAENIIHLFTLTNLGAPAAFKYFDTTIDRKRYTSTKEVLDATLIHQSITGLYETRIDLSQLGGDSAGGGGSGGGGSGGGGSGPKKKRKVAAAGSNHDQEFDPPKVYPPVPAEKRKPIRVLSLFDGIATGLLVLKDLGIQVDRYIASEVCEDSITVGMVRHQGKIMYVGDVRSVTQKHIQEWGPFDLVIGGSPCNDLSIVNPARKGLYEGTGRLFFEFYRLLHDARPKEGDDRPFFWLFENVVAMGVSDKRDISRFLESNPVMIDAKEVSAAHRARYFWGNLPGMNRPLASTVNDKLELQECLEHGRIAKFSKVRTITTRSNSIKQGKDQHFPVFMNEKEDILWCTEMERVFGFPVHYTDVSNMSRLARQRLLGRSWSVPVIRHLFAPLKEYFACVSSGNSNANSRGPSFSSGLVPLSLRGSHMNPLEMFETVPVWRRQPVRVLSLFEDIKKELTSLGFLESGSDPGQLKHVVDVTDTVRKDVEEWGPFDLVYGATPPLGHTCDRPPSWYLFQFHRLLQYARPKPGSPRPFFWMFVDNLVLNKEDLDVASRFLEMEPVTIPDVHGGSLQNAVRVWSNIPAIRSRHWALVSEEELSLLAQNKQSSKLAAKWPTKLVKNCFLPLREYFKYFSTELTSSLSGGKRPAATKKAGQAKKKKGS

SEQ ID NO: 71 - protein, 1977 aa, Artificial Sequence; identical to SEQ ID NO: 70
  Description of Artificial Sequence: Synthetic polypeptide

SEQ ID NO: 72 - protein, 1519 aa, Artificial Sequence
  Description of Artificial Sequence: Synthetic polypeptide
MAPKKKRKVGIHGVPAADKKYSIGLAIGTNSVGWAVITDEYKVPSKKFKVLGNTDRHSIKKNLIGALLFDSGETAEATRLKRTARRRYTRRKNRICYLQEIFSNEMAKVDDSFFHRLEESFLVEEDKKHERHPIFGNIVDEVAYHEKYPTIYHLRKKLVDSTDKADLRLIYLALAHMIKFRGHFLIEGDLNPDNSDVDKLFIQLVQTYNQLFEENPINASGVDAKAILSARLSKSRRLENLIAQLPGEKKNGLFGNLIALSLGLTPNFKSNFDLAEDAKLQLSKDTYDDDLDNLLAQIGDQYADLFLAAKNLSDAILLSDILRVNTEITKAPLSASMIKRYDEHHQDLTLLKALVRQQLPEKYKEIFFDQSKNGYAGYIDGGASQEEFYKFIKPILEKMDGTEELLVKLNREDLLRKQRTFDNGSIPHQIHLGELHAILRRQEDFYPFLKDNREKIEKILTFRIPYYVGPLARGNSRFAWMTRKSEETITPWNFEEVVDKGASAQSFIERMTNFDKNLPNEKVLPKHSLLYEYFTVYNELTKVKYVTEGMRKPAFLSGEQKKAIVDLLFKTNRKVTVKQLKEDYFKKIECFDSVEISGVEDRFNASLGTYHDLLKIIKDKDFLDNEENEDILEDIVLTLTLFEDREMIEERLKTYAHLFDDKVMKQLKRRRYTGWGRLSRKLINGIRDKQSGKTILDFLKSDGFANRNFMQLIHDDSLTFKEDIQKAQVSGQGDSLHEHIANLAGSPAIKKGILQTVKVVDELVKVMGRHKPENIVIEMARENQTTQKGQKNSRERMKRIEEGIKELGSQILKEHPVENTQLQNEKLYLYYLQNGRDMYVDQELDINRLSDYDVAAIVPQSFLKDDSIDNKVLTRSDKARGKSDNVPSEEVVKKMKNYWRQLLNAKLITQRKFDNLTKAERGGLSELDKAGFIKRQLVETRQITKHVAQILDSRMNTKYDENDKLIREVKVITLKSKLVSDFRKDFQFYKVREINNYHHAHDAYLNAVVGTALIKKYPKLESEFVYGDYKVYDVRKMIAKSEQEIGKATAKYFFYSNIMNFFKTEITLANGEIRKRPLIETNGETGEIVWDKGRDFATVRKVLSMPQVNIVKKTEVQTGGFSKESILPKRNSDKLIARKKDWDPKKYGGFDSPTVAYSVLVVAKVEKGKSKKLKSVKELLGITIMERSSFEKNPIDFLEAKGYKEVKKDLIIKLPKYSLFELENGRKRMLASAGELQKGNELALPSKYVNFLYLASHYEKLKGSPEDNEQKQLFVEQHKHYLDEIIEQISEFSKRVILADANLDKVLSAYNKHRDKPIREQAENIIHLFTLTNLGAPAAFKYFDTTIDRKRYTSTKEVLDATLIHQSITGLYETRIDLSQLGGDKRPAATKKAGQAKKKKASDAKSLTAWSRTLVTFKDVFVDFTREEWKLLDTAQQILYRNVMLENYKNLVSLGYQLTKPDVILRLEKGEEPWLVEREIHQETHPDSETAFEIKSSVSGGKRPAATKKAGQAKKKKGS

SEQ ID NO: 73 - protein, 1699 aa, Artificial Sequence
  Description of Artificial Sequence: Synthetic polypeptide
MAPKKKRKVGIHGVPAASGGGGSGNRAIRTEKIICRDVARGYENVPIPCVNGVDGEPCPEDYKYISENCETSTMNIDRNITHLQHCTCVDDCSSSNCLCGQLSIRCWYDKDGRLLQEFNKIEPPLIFECNQACSCWRNCKNRVVQSGIKVRLQLYRTAKMGWGVRALQTIPQGTFICEYVGELISDAEADVREDDSYLFDLDNKDGEVYCIDARYYGNISRFINHLCDPNIIPVRVFMLHQDLRFPRIAFFSSRDIRTGEELGFDYGDRFWDIKSKYFTCQCGSEKCKHSAEAIALEQSRLARLDGGGGSGDKKYSIGLAIGTNSVGWAVITDEYKVPSKKFKVLGNTDRHSIKKNLIGALLFDSGETAEATRLKRTARRRYTRRKNRICYLQEIFSNEMAKVDDSFFHRLEESFLVEEDKKHERHPIFGNIVDEVAYHEKYPTIYHLRKKLVDSTDKADLRLIYLALAHMIKFRGHFLIEGDLNPDNSDVDKLFIQLVQTYNQLFEENPINASGVDAKAILSARLSKSRRLENLIAQLPGEKKNGLFGNLIALSLGLTPNFKSNFDLAEDAKLQLSKDTYDDDLDNLLAQIGDQYADLFLAAKNLSDAILLSDILRVNTEITKAPLSASMIKRYDEHHQDLTLLKALVRQQLPEKYKEIFFDQSKNGYAGYIDGGASQEEFYKFIKPILEKMDGTEELLVKLNREDLLRKQRTFDNGSIPHQIHLGELHAILRRQEDFYPFLKDNREKIEKILTFRIPYYVGPLARGNSRFAWMTRKSEETITPWNFEEVVDKGASAQSFIERMTNFDKNLPNEKVLPKHSLLYEYFTVYNELTKVKYVTEGMRKPAFLSGEQKKAIVDLLFKTNRKVTVKQLKEDYFKKIECFDSVEISGVEDRFNASLGTYHDLLKIIKDKDFLDNEENEDILEDIVLTLTLFEDREMIEERLKTYAHLFDDKVMKQLKRRRYTGWGRLSRKLINGIRDKQSGKTILDFLKSDGFANRNFMQLIHDDSLTFKEDIQKAQVSGQGDSLHEHIANLAGSPAIKKGILQTVKVVDELVKVMGRHKPENIVIEMARENQTTQKGQKNSRERMKRIEEGIKELGSQILKEHPVENTQLQNEKLYLYYLQNGRDMYVDQELDINRLSDYDVAAIVPQSFLKDDSIDNKVLTRSDKARGKSDNVPSEEVVKKMKNYWRQLLNAKLITQRKFDNLTKAERGGLSELDKAGFIKRQLVETRQITKHVAQILDSRMNTKYDENDKLIREVKVITLKSKLVSDFRKDFQFYKVREINNYHHAHDAYLNAVVGTALIKKYPKLESEFVYGDYKVYDVRKMIAKSEQEIGKATAKYFFYSNIMNFFKTEITLANGEIRKRPLIETNGETGEIVWDKGRDFATVRKVLSMPQVNIVKKTEVQTGGFSKESILPKRNSDKLIARKKDWDPKKYGGFDSPTVAYSVLVVAKVEKGKSKKLKSVKELLGITIMERSSFEKNPIDFLEAKGYKEVKKDLIIKLPKYSLFELENGRKRMLASAGELQKGNELALPSKYVNFLYLASHYEKLKGSPEDNEQKQLFVEQHKHYLDEIIEQISEFSKRVILADANLDKVLSAYNKHRDKPIREQAENIIHLFTLTNLGAPAAFKYFDTTIDRKRYTSTKEVLDATLIHQSITGLYETRIDLSQLGGDSGGKRPAATKKAGQAKKKKGS

SEQ ID NO: 74 - protein, 1809 aa, Artificial Sequence
  Description of Artificial Sequence: Synthetic polypeptide
MAPKKKRKVGIHGVPAADKKYSIGLAIGTNSVGWAVITDEYKVPSKKFKVLGNTDRHSIKKNLIGALLFDSGETAEATRLKRTARRRYTRRKNRICYLQEIFSNEMAKVDDSFFHRLEESFLVEEDKKHERHPIFGNIVDEVAYHEKYPTIYHLRKKLVDSTDKADLRLIYLALAHMIKFRGHFLIEGDLNPDNSDVDKLFIQLVQTYNQLFEENPINASGVDAKAILSARLSKSRRLENLIAQLPGEKKNGLFGNLIALSLGLTPNFKSNFDLAEDAKLQLSKDTYDDDLDNLLAQIGDQYADLFLAAKNLSDAILLSDILRVNTEITKAPLSASMIKRYDEHHQDLTLLKALVRQQLPEKYKEIFFDQSKNGYAGYIDGGASQEEFYKFIKPILEKMDGTEELLVKLNREDLLRKQRTFDNGSIPHQIHLGELHAILRRQEDFYPFLKDNREKIEKILTFRIPYYVGPLARGNSRFAWMTRKSEETITPWNFEEVVDKGASAQSFIERMTNFDKNLPNEKVLPKHSLLYEYFTVYNELTKVKYVTEGMRKPAFLSGEQKKAIVDLLFKTNRKVTVKQLKEDYFKKIECFDSVEISGVEDRFNASLGTYHDLLKIIKDKDFLDNEENEDILEDIVLTLTLFEDREMIEERLKTYAHLFDDKVMKQLKRRRYTGWGRLSRKLINGIRDKQSGKTILDFLKSDGFANRNFMQLIHDDSLTFKEDIQKAQVSGQGDSLHEHIANLAGSPAIKKGILQTVKVVDELVKVMGRHKPENIVIEMARENQTTQKGQKNSRERMKRIEEGIKELGSQILKEHPVENTQLQNEKLYLYYLQNGRDMYVDQELDINRLSDYDVAAIVPQSFLKDDSIDNKVLTRSDKARGKSDNVPSEEVVKKMKNYWRQLLNAKLITQRKFDNLTKAERGGLSELDKAGFIKRQLVETRQITKHVAQILDSRMNTKYDENDKLIREVKVITLKSKLVSDFRKDFQFYKVREINNYHHAHDAYLNAVVGTALIKKYPKLESEFVYGDYKVYDVRKMIAKSEQEIGKATAKYFFYSNIMNFFKTEITLANGEIRKRPLIETNGETGEIVWDKGRDFATVRKVLSMPQVNIVKKTEVQTGGFSKESILPKRNSDKLIARKKDWDPKKYGGFDSPTVAYSVLVVAKVEKGKSKKLKSVKELLGITIMERSSFEKNPIDFLEAKGYKEVKKDLIIKLPKYSLFELENGRKRMLASAGELQKGNELALPSKYVNFLYLASHYEKLKGSPEDNEQKQLFVEQHKHYLDEIIEQISEFSKRVILADANLDKVLSAYNKHRDKPIREQAENIIHLFTLTNLGAPAAFKYFDTTIDRKRYTSTKEVLDATLIHQSITGLYETRIDLSQLGGDSGGKRPAATKKAGQAKKKKSGGGGSEEPEEPADSGQSLVPVYIYSPEYVSMCDSLAKIPKRASMVHSLIEAYALHKQMRIVKPKVASMEEMATFHTDAYLQHLQKVSQEGDDDHPDSIEYGLGYDCPATEGIFDYAAAIGGATITAAQCLIDGMCKVAINWSGGWHHAKKDEASGFCYLNDAVLGILRLRRKFERILYVDLDLHHGDGVEDAFSFTSKVMTVSLHKFSPGFFPGTGDVSDVGLGKGRYYSVNVPIQDGIQDEKYYQICESVLKEVYQAFNPKAVVLQLGADTIAGDPMCSFNMTPVGIGKCLKYILQWQLATLILGGGGYNLANTARCWTYLTGVILGKTLSSEIPDHEFFTAYGPDYVLEITPSCRPDRNEPHRIQQILNYIKGNLKHVVGGGGSGKRPAATKKAGQAKKKKGS

SEQ ID NO: 75 - protein, 2281 aa, Artificial Sequence
  Description of Artificial Sequence: Synthetic polypeptide
MAPKKKRKVGIHGVPAADKKYSIGLAIGTNSVGWAVITDEYKVPSKKFKVLGNTDRHSIKKNLIGALLFDSGETAEATRLKRTARRRYTRRKNRICYLQEIFSNEMAKVDDSFFHRLEESFLVEEDKKHERHPIFGNIVDEVAYHEKYPTIYHLRKKLVDSTDKADLRLIYLALAHMIKFRGHFLIEGDLNPDNSDVDKLFIQLVQTYNQLFEENPINASGVDAKAILSARLSKSRRLENLIAQLPGEKKNGLFGNLIALSLGLTPNFKSNFDLAEDAKLQLSKDTYDDDLDNLLAQIGDQYADLFLAAKNLSDAILLSDILRVNTEITKAPLSASMIKRYDEHHQDLTLLKALVRQQLPEKYKEIFFDQSKNGYAGYIDGGASQEEFYKFIKPILEKMDGTEELLVKLNREDLLRKQRTFDNGSIPHQIHLGELHAILRRQEDFYPFLKDNREKIEKILTFRIPYYVGPLARGNSRFAWMTRKSEETITPWNFEEVVDKGASAQSFIERMTNFDKNLPNEKVLPKHSLLYEYFTVYNELTKVKYVTEGMRKPAFLSGEQKKAIVDLLFKTNRKVTVKQLKEDYFKKIECFDSVEISGVEDRFNASLGTYHDLLKIIKDKDFLDNEENEDILEDIVLTLTLFEDREMIEERLKTYAHLFDDKVMKQLKRRRYTGWGRLSRKLINGIRDKQSGKTILDFLKSDGFANRNFMQLIHDDSLTFKEDIQKAQVSGQGDSLHEHIANLAGSPAIKKGILQTVKVVDELVKVMGRHKPENIVIEMARENQTTQKGQKNSRERMKRIEEGIKELGSQILKEHPVENTQLQNEKLYLYYLQNGRDMYVDQELDINRLSDYDVAAIVPQSFLKDDSIDNKVLTRSDKARGKSDNVPSEEVVKKMKNYWRQLLNAKLITQRKFDNLTKAERGGLSELDKAGFIKRQLVETRQITKHVAQILDSRMNTKYDENDKLIREVKVITLKSKLVSDFRKDFQFYKVREINNYHHAHDAYLNAVVGTALIKKYPKLESEFVYGDYKVYDVRKMIAKSEQEIGKATAKYFFYSNIMNFFKTEITLANGEIRKRPLIETNGETGEIVWDKGRDFATVRKVLSMPQVNIVKKTEVQTGGFSKESILPKRNSDKLIARKKDWDPKKYGGFDSPTVAYSVLVVAKVEKGKSKKLKSVKELLGITIMERSSFEKNPIDFLEAKGYKEVKKDLIIKLPKYSLFELENGRKRMLASAGELQKGNELALPSKYVNFLYLASHYEKLKGSPEDNEQKQLFVEQHKHYLDEIIEQISEFSKRVILADANLDKVLSAYNKHRDKPIREQAENIIHLFTLTNLGAPAAFKYFDTTIDRKRYTSTKEVLDATLIHQSITGLYETRIDLSQLGGDSGGKRPAATKKAGQAKKKKESGGGSLSGKKAAAAAAAAAAAATGTEAGPGTAGGSENGSEVAAQPAGLSGPAEVGPGAVGERTPRKKEPPRASPPGGLAEPPGSAGPQAGPTVVPGSATPMETGIAETPEGRRTSRRKRAKVEYREMDESLANLSEDEYYSEEERNAKAEKEKKLPPPPPQAPPEEENESEPEEPSGVEGAAFQSRLPHDRMTSQEAACFPDIISGPQQTQKVFLFIRNRTLQLWLDNPKIQLTFEATLQQLEAPYNSDTVLVHRVHSYLERHGLINFGIYKRIKPLPTKKTGKVIIIGSGVSGLAAARQLQSFGMDVTLLEARDRVGGRVATFRKGNYVADLGAMVVTGLGGNPMAVVSKQVNMELAKIKQKCPLYEANGQAVPKEKDEMVEQEFNRLLEATSYLSHQLDFNVLNNKHVSLGQALEVVIQLQEKHVKDEQIEHWKKIVKTQEELKELLNKMVNLKEKIKELHQQYKEASEVKPPRDITAEFLVKSKHRDLTALCKEYDELAETQGKLEEKLQELEANPPSDVYLSSRDRQILDWHFANLEFANATPLSTLSLKHWDQDDDFEFTGSHLTVRNGYSCVPVALAEGLDIKLNTAVRQVRYTASGCEVIAVNTRSTSQTFIYKCDAVLCTLPLGVLKQQPPAVQFVPPLPEWKTSAVQRMGFGNLNKVVLCFDRVFWDPSVNLFGHVGSTTASRGELFLFWNLYKAPILLALVAGEAAGIMENISDDVIVGRCLAILKGIFGSSAVPQPKETVVSRWRADPWARGSYSYVAAGSSGNDYDLMAQPITPGPSIPGAPQPIPRLFFAGEHTIRNYPATVHGALLSGLREAGRIADQFLGAMYTLPRQATPGVPAQQSPSMSGGKRPAATKKAGQAKKKKGS

SEQ ID NO: 76 - protein, 2168 aa, Artificial Sequence
  Description of Artificial Sequence: Synthetic polypeptide
MAPKKKRKVGGSGGSGQTGKKSEKGPVCWRKRVKSEYMRLRQLKRFRRADEVKSMFSSNRQKILERTEILNQEWKQRRIQPVHILTSVSSLRGTRECSVTSDLDFPTQVIPLKTLNAVASVPIMYSWSPLQQNFMVEDETVLHNIPYMGDEVLDQDGTFIEELIKNYDGKVHGDRECGFINDEIFVELVNALGQYNDDDDDDDGDDPEEREEKQKDLEDHRDDKESRPPRKFPSDKIFEAISSMFPDKGTAEELKEKYKELTEQQLPGALPPECTPNIDGPNAKSVQREQSLHSFHTLFCRRCFKYDCFLHPFHATPNTYKRKNTETALDNKPCGPQCYQHLEGAKEFAAALTAERIKTPPKRPGGRRRGRLPNNSSRPSTPTINVLESKDTDSDREAGTETGGENNDKEEEEKKDETSSSSEANSRCQTPIKMKPNIEPPENVEWSGAEASMFRVLIGTYYDNFCAIARLIGTKTCRQVYEFRVKESSIIAPAPAEDVDTPPRKKKRKHRLWAAHCRKIQLKKDGSSNHVYNYQPCDHPRQPCDSSCPCVIAQNFCEKFCQCSSECQNRFPGCRCKAQCNTKQCPCYLAVRECDPDLCLTCGAADHWDSKNVSCKNCSIQRGSKKHLLLAPSDVAGWGIFIKDPVQKNEFISEYCGEIISQDEADRRGKVYDKYMCSFLFNLNNDFVVDATRKGNKIRFANHSVNPNCYAKVMMVNGDHRIGIFAKRAIQTGEELFFDYRYSQADALKYVGIEREMEIPSTGGSGGSGGSGGSGGSGRPDKKYSIGLAIGTNSVGWAVITDEYKVPSKKFKVLGNTDRHSIKKNLIGALLFDSGETAEATRLKRTARRRYTRRKNRICYLQEIFSNEMAKVDDSFFHRLEESFLVEEDKKHERHPIFGNIVDEVAYHEKYPTIYHLRKKLVDSTDKADLRLIYLALAHMIKFRGHFLIEGDLNPDNSDVDKLFIQLVQTYNQLFEENPINASGVDAKAILSARLSKSRRLENLIAQLPGEKKNGLFGNLIALSLGLTPNFKSNFDLAEDAKLQLSKDTYDDDLDNLLAQIGDQYADLFLAAKNLSDAILLSDILRVNTEITKAPLSASMIKRYDEHHQDLTLLKALVRQQLPEKYKEIFFDQSKNGYAGYIDGGASQEEFYKFIKPILEKMDGTEELLVKLNREDLLRKQRTFDNGSIPHQIHLGELHAILRRQEDFYPFLKDNREKIEKILTFRIPYYVGPLARGNSRFAWMTRKSEETITPWNFEEVVDKGASAQSFIERMTNFDKNLPNEKVLPKHSLLYEYFTVYNELTKVKYVTEGMRKPAFLSGEQKKAIVDLLFKTNRKVTVKQLKEDYFKKIECFDSVEISGVEDRFNASLGTYHDLLKIIKDKDFLDNEENEDILEDIVLTLTLFEDREMIEERLKTYAHLFDDKVMKQLKRRRYTGWGRLSRKLINGIRDKQSGKTILDFLKSDGFANRNFMQLIHDDSLTFKEDIQKAQVSGQGDSLHEHIANLAGSPAIKKGILQTVKVVDELVKVMGRHKPENIVIEMARENQTTQKGQKNSRERMKRIEEGIKELGSQILKEHPVENTQLQNEKLYLYYLQNGRDMYVDQELDINRLSDYDVAAIVPQSFLKDDSIDNKVLTRSDKARGKSDNVPSEEVVKKMKNYWRQLLNAKLITQRKFDNLTKAERGGLSELDKAGFIKRQLVETRQITKHVAQILDSRMNTKYDENDKLIREVKVITLKSKLVSDFRKDFQFYKVREINNYHHAHDAYLNAVVGTALIKKYPKLESEFVYGDYKVYDVRKMIAKSEQEIGKATAKYFFYSNIMNFFKTEITLANGEIRKRPLIETNGETGEIVWDKGRDFATVRKVLSMPQVNIVKKTEVQTGGFSKESILPKRNSDKLIARKKDWDPKKYGGFDSPTVAYSVLVVAKVEKGKSKKLKSVKELLGITIMERSSFEKNPIDFLEAKGYKEVKKDLIIKLPKYSLFELENGRKRMLASAGELQKGNELALPSKYVNFLYLASHYEKLKGSPEDNEQKQLFVEQHKHYLDEIIEQISEFSKRVILADANLDKVLSAYNKHRDKPIREQAENIIHLFTLTNLGAPAAFKYFDTTIDRKRYTSTKEVLDATLIHQSITGLYETRIDLSQLGGDSGGKRPAATKKAGQAKKKKGS

SEQ ID NO: 77 - protein, 2292 aa, Artificial Sequence
  Description of Artificial Sequence: Synthetic polypeptide
MAPKKKRKVGGSGGSGQTGKKSEKGPVCWRKRVKSEYMRLRQLKRFRRADEVKSMFSSNRQKILERTEILNQEWKQRRIQPVHILTSVSSLRGTRECSVTSDLDFPTQVIPLKTLNAVASVPIMYSWSPLQQNFMVEDETVLHNIPYMGDEVLDQDGTFIEELIKNYDGKVHGDRECGFINDEIFVELVNALGQYNDDDDDDDGDDPEEREEKQKDLEDHRDDKESRPPRKFPSDKIFEAISSMFPDKGTAEELKEKYKELTEQQLPGALPPECTPNIDGPNAKSVQREQSLHSFHTLFCRRCFKYDCFLHPFHATPNTYKRKNTETALDNKPCGPQCYQHLEGAKEFAAALTAERIKTPPKRPGGRRRGRLPNNSSRPSTPTINVLESKDTDSDREAGTETGGENNDKEEEEKKDETSSSSEANSRCQTPIKMKPNIEPPENVEWSGAEASMFRVLIGTYYDNFCAIARLIGTKTCRQVYEFRVKESSIIAPAPAEDVDTPPRKKKRKHRLWAAHCRKIQLKKDGSSNHVYNYQPCDHPRQPCDSSCPCVIAQNFCEKFCQCSSECQNRFPGCRCKAQCNTKQCPCYLAVRECDPDLCLTCGAADHWDSKNVSCKNCSIQRGSKKHLLLAPSDVAGWGIFIKDPVQKNEFISEYCGEIISQDEADRRGKVYDKYMCSFLFNLNNDFVVDATRKGNKIRFANHSVNPNCYAKVMMVNGDHRIGIFAKRAIQTGEELFFDYRYSQADALKYVGIEREMEIPSTGGSGGSGGSGGSGGSGRPDKKYSIGLAIGTNSVGWAVITDEYKVPSKKFKVLGNTDRHSIKKNLIGALLFDSGETAEATRLKRTARRRYTRRKNRICYLQEIFSNEMAKVDDSFFHRLEESFLVEEDKKHERHPIFGNIVDEVAYHEKYPTIYHLRKKLVDSTDKADLRLIYLALAHMIKFRGHFLIEGDLNPDNSDVDKLFIQLVQTYNQLFEENPINASGVDAKAILSARLSKSRRLENLIAQLPGEKKNGLFGNLIALSLGLTPNFKSNFDLAEDAKLQLSKDTYDDDLDNLLAQIGDQYADLFLAAKNLSDAILLSDILRVNTEITKAPLSASMIKRYDEHHQDLTLLKALVRQQLPEKYKEIFFDQSKNGYAGYIDGGASQEEFYKFIKPILEKMDGTEELLVKLNREDLLRKQRTFDNGSIPHQIHLGELHAILRRQEDFYPFLKDNREKIEKILTFRIPYYVGPLARGNSRFAWMTRKSEETITPWNFEEVVDKGASAQSFIERMTNFDKNLPNEKVLPKHSLLYEYFTVYNELTKVKYVTEGMRKPAFLSGEQKKAIVDLLFKTNRKVTVKQLKEDYFKKIECFDSVEISGVEDRFNASLGTYHDLLKIIKDKDFLDNEENEDILEDIVLTLTLFEDREMIEERLKTYAHLFDDKVMKQLKRRRYTGWGRLSRKLINGIRDKQSGKTILDFLKSDGFANRNFMQLIHDDSLTFKEDIQKAQVSGQGDSLHEHIANLAGSPAIKKGILQTVKVVDELVKVMGRHKPENIVIEMARENQTTQKGQKNSRERMKRIEEGIKELGSQILKEHPVENTQLQNEKLYLYYLQNGRDMYVDQELDINRLSDYDVAAIVPQSFLKDDSIDNKVLTRSDKARGKSDNVPSEEVVKKMKNYWRQLLNAKLITQRKFDNLTKAERGGLSELDKAGFIKRQLVETRQITKHVAQILDSRMNTKYDENDKLIREVKVITLKSKLVSDFRKDFQFYKVREINNYHHAHDAYLNAVVGTALIKKYPKLESEFVYGDYKVYDVRKMIAKSEQEIGKATAKYFFYSNIMNFFKTEITLANGEIRKRPLIETNGETGEIVWDKGRDFATVRKVLSMPQVNIVKKTEVQTGGFSKESILPKRNSDKLIARKKDWDPKKYGGFDSPTVAYSVLVVAKVEKGKSKKLKSVKELLGITIMERSSFEKNPIDFLEAKGYKEVKKDLIIKLPKYSLFELENGRKRMLASAGELQKGNELALPSKYVNFLYLASHYEKLKGSPEDNEQKQLFVEQHKHYLDEIIEQISEFSKRVILADANLDKVLSAYNKHRDKPIREQAENIIHLFTLTNLGAPAAFKYFDTTIDRKRYTSTKEVLDATLIHQSITGLYETRIDLSQLGGDSGGKRPAATKKAGQAKKKKSGGGGSDAKSLTAWSRTLVTFKDVFVDFTREEWKLLDTAQQILYRNVMLENYKNLVSLGYQLTKPDVILRLEKGEEPWLVEREIHQETHPDSETAFEIKSSVGGGGSGKRPAATKKAGQAKKKKGS

SEQ ID NO: 78 - protein, 1923 aa, Artificial Sequence
  Description of Artificial Sequence: Synthetic polypeptide
MAPKKKRKVGIHGVPAASGGGGSGSAAIAEVLLNARCDLHAVNYHGDTPLHIAARESYHDCVLLFLSRGANPELRNKEGDTAWDLTPERSDVWFALQLNRKLRLGVGNRAIRTEKIICRDVARGYENVPIPCVNGVDGEPCPEDYKYISENCETSTMNIDRNITHLQHCTCVDDCSSSNCLCGQLSIRCWYDKDGRLLQEFNKIEPPLIFECNQACSCWRNCKNRVVQSGIKVRLQLYRTAKMGWGVRALQTIPQGTFICEYVGELISDAEADVREDDSYLFDLDNKDGEVYCIDARYYGNISRFINHLCDPNIIPVRVFMLHQDLRFPRIAFFSSRDIRTGEELGFDYGDRFWDIKSKYFTCQCGSEKCKHSAEAIALEQSRLARLDPHPELLPELGSLPPVNTGGGGSGDKKYSIGLAIGTNSVGWAVITDEYKVPSKKFKVLGNTDRHSIKKNLIGALLFDSGETAEATRLKRTARRRYTRRKNRICYLQEIFSNEMAKVDDSFFHRLEESFLVEEDKKHERHPIFGNIVDEVAYHEKYPTIYHLRKKLVDSTDKADLRLIYLALAHMIKFRGHFLIEGDLNPDNSDVDKLFIQLVQTYNQLFEENPINASGVDAKAILSARLSKSRRLENLIAQLPGEKKNGLFGNLIALSLGLTPNFKSNFDLAEDAKLQLSKDTYDDDLDNLLAQIGDQYADLFLAAKNLSDAILLSDILRVNTEITKAPLSASMIKRYDEHHQDLTLLKALVRQQLPEKYKEIFFDQSKNGYAGYIDGGASQEEFYKFIKPILEKMDGTEELLVKLNREDLLRKQRTFDNGSIPHQIHLGELHAILRRQEDFYPFLKDNREKIEKILTFRIPYYVGPLARGNSRFAWMTRKSEETITPWNFEEVVDKGASAQSFIERMTNFDKNLPNEKVLPKHSLLYEYFTVYNELTKVKYVTEGMRKPAFLSGEQKKAIVDLLFKTNRKVTVKQLKEDYFKKIECFDSVEISGVEDRFNASLGTYHDLLKIIKDKDFLDNEENEDILEDIVLTLTLFEDREMIEERLKTYAHLFDDKVMKQLKRRRYTGWGRLSRKLINGIRDKQSGKTILDFLKSDGFANRNFMQLIHDDSLTFKEDIQKAQVSGQGDSLHEHIANLAGSPAIKKGILQTVKVVDELVKVMGRHKPENIVIEMARENQTTQKGQKNSRERMKRIEEGIKELGSQILKEHPVENTQLQNEKLYLYYLQNGRDMYVDQELDINRLSDYDVAAIVPQSFLKDDSIDNKVLTRSDKARGKSDNVPSEEVVKKMKNYWRQLLNAKLITQRKFDNLTKAERGGLSELDKAGFIKRQLVETRQITKHVAQILDSRMNTKYDENDKLIREVKVITLKSKLVSDFRKDFQFYKVREINNYHHAHDAYLNAVVGTALIKKYPKLESEFVYGDYKVYDVRKMIAKSEQEIGKATAKYFFYSNIMNFFKTEITLANGEIRKRPLIETNGETGEIVWDKGRDFATVRKVLSMPQVNIVKKTEVQTGGFSKESILPKRNSDKLIARKKDWDPKKYGGFDSPTVAYSVLVVAKVEKGKSKKLKSVKELLGITIMERSSFEKNPIDFLEAKGYKEVKKDLIIKLPKYSLFELENGRKRMLASAGELQKGNELALPSKYVNFLYLASHYEKLKGSPEDNEQKQLFVEQHKHYLDEIIEQISEFSKRVILADANLDKVLSAYNKHRDKPIREQAENIIHLFTLTNLGAPAAFKYFDTTIDRKRYTSTKEVLDATLIHQSITGLYETRIDLSQLGGDSGGKRPAATKKAGQAKKKKSGGGGSDAKSLTAWSRTLVTFKDVFVDFTREEWKLLDTAQQILYRNVMLENYKNLVSLGYQLTKPDVILRLEKGEEPWLVEREIHQETHPDSETAFEIKSSVGGGGSGKRPAATKKAGQAKKKKGS

SEQ ID NO: 79 - protein, 1533 aa, Artificial Sequence
  Description of Artificial Sequence: Synthetic polypeptide
MAPKKKRKVGIHGVPAASGGGGSSRRKQSNPRQIKRSLGDMEAREEVQLVGASHMEQKATAPEAPSPGGGGSGDKKYSIGLAIGTNSVGWAVITDEYKVPSKKFKVLGNTDRHSIKKNLIGALLFDSGETAEATRLKRTARRRYTRRKNRICYLQEIFSNEMAKVDDSFFHRLEESFLVEEDKKHERHPIFGNIVDEVAYHEKYPTIYHLRKKLVDSTDKADLRLIYLALAHMIKFRGHFLIEGDLNPDNSDVDKLFIQLVQTYNQLFEENPINASGVDAKAILSARLSKSRRLENLIAQLPGEKKNGLFGNLIALSLGLTPNFKSNFDLAEDAKLQLSKDTYDDDLDNLLAQIGDQYADLFLAAKNLSDAILLSDILRVNTEITKAPLSASMIKRYDEHHQDLTLLKALVRQQLPEKYKEIFFDQSKNGYAGYIDGGASQEEFYKFIKPILEKMDGTEELLVKLNREDLLRKQRTFDNGSIPHQIHLGELHAILRRQEDFYPFLKDNREKIEKILTFRIPYYVGPLARGNSRFAWMTRKSEETITPWNFEEVVDKGASAQSFIERMTNFDKNLPNEKVLPKHSLLYEYFTVYNELTKVKYVTEGMRKPAFLSGEQKKAIVDLLFKTNRKVTVKQLKEDYFKKIECFDSVEISGVEDRFNASLGTYHDLLKIIKDKDFLDNEENEDILEDIVLTLTLFEDREMIEERLKTYAHLFDDKVMKQLKRRRYTGWGRLSRKLINGIRDKQSGKTILDFLKSDGFANRNFMQLIHDDSLTFKEDIQKAQVSGQGDSLHEHIANLAGSPAIKKGILQTVKVVDELVKVMGRHKPENIVIEMARENQTTQKGQKNSRERMKRIEEGIKELGSQILKEHPVENTQLQNEKLYLYYLQNGRDMYVDQELDINRLSDYDVAAIVPQSFLKDDSIDNKVLTRSDKARGKSDNVPSEEVVKKMKNYWRQLLNAKLITQRKFDNLTKAERGGLSELDKAGFIKRQLVETRQITKHVAQILDSRMNTKYDENDKLIREVKVITLKSKLVSDFRKDFQFYKVREINNYHHAHDAYLNAVVGTALIKKYPKLESEFVYGDYKVYDVRKMIAKSEQEIGKATAKYFFYSNIMNFFKTEITLANGEIRKRPLIETNGETGEIVWDKGRDFATVRKVLSMPQVNIVKKTEVQTGGFSKESILPKRNSDKLIARKKDWDPKKYGGFDSPTVAYSVLVVAKVEKGKSKKLKSVKELLGITIMERSSFEKNPIDFLEAKGYKEVKKDLIIKLPKYSLFELENGRKRMLASAGELQKGNELALPSKYVNFLYLASHYEKLKGSPEDNEQKQLFVEQHKHYLDEIIEQISEFSKRVILADANLDKVLSAYNKHRDKPIREQAENIIHLFTLTNLGAPAAFKYFDTTIDRKRYTSTKEVLDATLIHQSITGLYETRIDLSQLGGDSGGKRPAATKKAGQAKKKKSGGGGSSRRKQSNPRQIKRSLGDMEAREEVQLVGASHMEQKATAPEAPSPGGGGSGKRPAATKKAGQAKKKKGS

SEQ ID NO: 80 - protein, 9 aa, Unknown
  Description of Unknown: HA tag sequence
YPYDVPDYA

SEQ ID NO: 81 - DNA, 20 bp, Unknown
  Description of Unknown: CTCF-binding motif sequence
  modified_base (1)..(1): a, c, t, g, unknown or other
  modified_base (3)..(3): a, c, t, g, unknown or other
nbndccdshagrkgghrshv

SEQ ID NO: 82 - DNA, 20 bp, Unknown
  Description of Unknown: CTCF-binding motif sequence
  modified_base (18)..(18): a, c, t, g, unknown or other
  modified_base (20)..(20): a, c, t, g, unknown or other
vhsrhggkrgahsdccdnbn

SEQ ID NO: 83 - DNA, 10 bp, Unknown
  Description of Unknown: YY1-binding motif sequence
  modified_base (8)..(8): a, c, t, g, unknown or other
ccgccatntt

SEQ ID NO: 84 - DNA, 10 bp, Unknown
  Description of Unknown: YY1-binding motif sequence
  modified_base (3)..(3): a, c, t, g, unknown or other
aanatggcgg

SEQ ID NO: 85 - protein, 780 aa, Homo sapiens
MKGDTRHLNGEEDAGGREDSILVNGACSDQSSDSPPILEAIRTPEIRGRRSSSRLSKREVSSLLSYTQDLTGDGDGEDGDGSDTPVMPKLFRETRTRSESPAVRTRNNNSVSSRERHRPSPRSTRGRQGRNHVDESPVEFPATRSLRRRATASAGTPWPSPPSSYLTIDLTDDTEDTHGTPQSSSTPYARLAQDSQQGGMESPQVEADSGDGDSSEYQVSADKLVALGLFSQHFNLATFNKLVSYRKAMYHALEKARVRAGKTFPSSPGDSLEDQLKPMLEWAHGGFKPTGIEGLKPNNTQPENKTRRRTADDSATSDYCPAPKRLKTNCYNNGKDRGDEDQSREQMASDVANNKSSLEDGCLSCGRKNPVSFHPLFEGGLCQTCRDRFLELFYMYDDDGYQSYCTVCCEGRELLLCSNTSCCRCFCVECLEVLVGTGTAAEAKLQEPWSCYMCLPQRCHGVLRRRKDWNVRLQAFFTSDTGLEYEAPKLYPAIPAARRRPIRVLSLFDGIATGYLVLKELGIKVGKYVASEVCEESIAVGTVKHEGNIKYVNDVRNITKKNIEEWGPFDLVIGGSPCNDLSNVNPARKGLYEGTGRLFFEFYHLLNYSRPKEGDDRPFFWMFENVVAMKVGDKRDISRFLECNPVMIDAIKVSAAHRARYFWGNLPGMNRPVIASKNDKLELQDCLEYNRIAKLKKVQTITTKSNSIKQGKNQLFPVVMNGKEDVLWCTELERIFGFPVHYTDVSNMGRGARQKLLGRSWSVPVIRHLFAPLKDYFACE

SEQ ID NO: 86 - protein, 6 aa, Simian virus 40
PKKKRK

SEQ ID NO: 87 - protein, 15 aa, Unknown
  Description of Unknown: Nucleoplasmin bipartite NLS sequence
KRPAATKKAGQAKKK

SEQ ID NO: 88 - protein, 1053 aa, Artificial Sequence
  Description of Artificial Sequence: Synthetic polypeptide
AKRNYILGLAIGITSVGYGIIDYETRDVIDAGVRLFKEANVENNEGRRSKRGARRLKRRRRHRIQRVKKLLFDYNLLTDHSELSGINPYEARVKGLSQKLSEEEFSAALLHLAKRRGVHNVNEVEEDTGNELSTKEQISRNSKALEEKYVAELQLERLKKDGEVRGSINRFKTSDYVKEAKQLLKVQKAYHQLDQSFIDTYIDLLETRRTYYEGPGEGSPFGWKDIKEWYEMLMGHCTYFPEELRSVKYAYNADLYNALNDLNNLVITRDENEKLEYYEKFQIIENVFKQKKKPTLKQIAKEILVNEEDIKGYRVTSTGKPEFTNLKVYHDIKDITARKEIIENAELLDQIAKILTIYQSSEDIQEELTNLNSELTQEEIEQISNLKGYTGTHNLSLKAINLILDELWHTNDNQIAIFNRLKLVPKKVDLSQQKEIPTTLVDDFILSPVVKRSFIQSIKVINAIIKKYGLPNDIIIELAREKNSKDAQKMINEMQKRNRQTNERIEEIIRTTGKENAKYLIEKIKLHDMQEGKCLYSLEAIPLEDLLNNPFNYEVDAIIPRSVSFDNSFNNKVLVKQEENSKKGNRTPFQYLSSSDSKISYETFKKHILNLAKGKGRISKTKKEYLLEERDINRFSVQKDFINRNLVDTRYATRGLMNLLRSYFRVNNLDVKVKSINGGFTSFLRRKWKFKKERNKGYKHHAEDALIIANADFIFKEWKKLDKAKKVMENQMFEEKQAESMPEIETEQEYKEIFITPHQIKHIKDFKDYKYSHRVDKKPNRKLINDTLYSTRKDDKGNTLIVNNLNGLYDKDNDKLKKLINKSPEKLLMYHHDPQTYQKLKLIMEQYGDEKNPLYKYYEETGNYLTKYSKKDNGPVIKKIKYYGNKLNAHLDITDDYPNSRNKVVKLSLKPYRFDVYLDNGVYKFVTVKNLDVIKKENYYEVNSKCYEEAKKLKKISNQAEFIASFYKNDLIKINGELYRVIGVNNDLLNRIEVNMIDITYREYLENMNDKRPPHIIKTIASKTQSIKKYSTDILGNLYEVKSKKHPQIIKKG

SEQ ID NO: 89 - DNA, 3159 bp, Artificial Sequence
  Description of Artificial Sequence: Synthetic polynucleotide
gccaagcggaactacatcctgggcctggccatcggcatcaccagcgtgggctacggcatcatcgactacgagacccgggacgtgatcgacgccggcgtgcggctgttcaaggaggccaacgtggagaacaacgagggccggcggagcaagcggggcgcccggcggctgaagcggcggcggcggcaccggatccagcgggtgaagaagctgctgttcgactacaacctgctgaccgaccacagcgagctgagcggcatcaacccctacgaggcccgggtgaagggcctgagccagaagctgagcgaggaggagttcagcgccgccctgctgcacctggccaagcggcggggcgtgcacaacgtgaacgaggtggaggaggacaccggcaacgagctgagcaccaaggagcagatcagccggaacagcaaggccctggaggagaagtacgtggccgagctgcagctggagcggctgaagaaggacggcgaggtgcggggcagcatcaaccggttcaagaccagcgactacgtgaaggaggccaagcagctgctgaaggtgcagaaggcctaccaccagctggaccagagcttcatcgacacctacatcgacctgctggagacccggcggacctactacgagggccccggcgagggcagccccttcggctggaaggacatcaaggagtggtacgagatgctgatgggccactgcacctacttccccgaggagctgcggagcgtgaagtacgcctacaacgccgacctgtacaacgccctgaacgacctgaacaacctggtgatcacccgggacgagaacgagaagctggagtactacgagaagttccagatcatcgagaacgtgttcaagcagaagaagaagcccaccctgaagcagatcgccaaggagatcctggtgaacgaggaggacatcaagggctaccgggtgaccagcaccggcaagcccgagttcaccaacctgaaggtgtaccacgacatcaaggacatcaccgcccggaaggagatcatcgagaacgccgagctgctggaccagatcgccaagatcctgaccatctaccagagcagcgaggacatccaggaggagctgaccaacctgaacagcgagctgacccaggaggagatcgagcagatcagcaacctgaagggctacaccggcacccacaacctgagcctgaaggccatcaacctgatcctggacgagctgtggcacaccaacgacaaccagatcgccatcttcaaccggctgaagctggtgcccaagaaggtggacctgagccagcagaaggagatccccaccaccctggtggacgacttcatcctgagccccgtggtgaagcggagcttcatccagagcatcaaggtgatcaacgccatcatcaagaagtacggcctgcccaacgacatcatcatcgagctggcccgggagaagaacagcaaggacgcccagaagatgatcaacgagatgcagaagcggaaccggcagaccaacgagcggatcgaggagatcatccggaccaccggcaaggagaacgccaagtacctgatcgagaagatcaagctgcacgacatgcaggagggcaagtgcctgtacagcctggaggccatccccctggaggacctgctgaacaaccccttcaactacgaggtggacgccatcatcccccggagcgtgagcttcgacaacagcttcaacaacaaggtgctggtgaagcaggaggagaacagcaagaagggcaaccggacccccttccagtacctgagcagcagcgacagcaagatcagctacgagaccttcaagaagcacatcctgaacctggccaagggcaagggccggatcagcaagaccaagaaggagtacctgctggaggagcgggacatcaaccggttcagcgtgcagaaggacttcatcaaccggaacctggtggacacccggtacgccacccggggcctgatgaacctgctgcggagctacttccgggtgaacaacctggacgtgaaggtgaaatccatcaacggcggcttcaccagcttcctgcggcggaagtggaagttcaagaaggagcggaacaagggctacaagcaccacgccgaggacgccctgatcatcgccaacgccgacttcatcttcaaggagtggaagaagctggacaaggccaagaaggtgatggagaaccagatgttcgaggagaagcaggccgagagcatgcccgagatcgagaccgagcaggagtacaaggagatcttcatcaccccccaccagatcaagcacatcaaggacttcaaggactacaagtacagccaccgggtggacaagaagcccaaccggaagctgatcaacgacaccctgtacagcacccggaaggacgacaagggcaacaccctgatcgtgaacaacctgaacggcctgtacgacaaggacaacgacaagctgaagaagctgatcaacaagagccccgagaagctgctgatgtaccaccacgacccccagacctaccagaagctgaagctgatcatggagcagtacggcgacgagaagaaccccctgtacaagtactacgaggagaccggcaactacctgaccaagtacagcaagaaggacaacggccccgtgatcaagaagatcaagtactacggcaacaagctgaacgcccacctggacatcaccgacgactaccccaacagccggaacaaggtggtgaagctgagcctgaagccctaccggttcgacgtgtacctggacaacggcgtgtacaagttcgtgaccgtgaagaacctggacgtgatcaagaaggagaactactacgaggtgaacagcaagtgctacgaggaggccaagaagctgaagaagatcagcaaccaggccgagttcatcgccagcttctacaagaacgacctgatcaagatcaacggcgagctgtaccgggtgatcggcgtgaacaacgacctgctgaaccggatcgaggtgaacatgatcgacatcacctaccgggagtacctggagaacatgaacgacaagcggcccccccacatcatcaagaccatcgccagcaagacccagagcatcaagaagtacagcaccgacatcctgggcaacctgtacgaggtgaaatccaagaagcacccccagatcatcaagaagggc

SEQ ID NO: 90 - protein, 386 aa, Spiroplasma monobiae
MSKVENKTKKLRVFEAFAGIGAQRKALEKVRKDEYEIVGLAEWYVPAIVMYQAIHNNFHTKLEYKSVSREEMIDYLENKTLSWNSKNPVSNGYWKRKKDDELKIIYNAIKLSEKEGNIFDIRDLYKRTLKNIDLLTYSFPCQDLSQQGIQKGMKRGSGTRSGLLWEIERALDSTEKNDLPKYLLMENVGALLHKKNEEELNQWKQKLESLGYQNSIEVLNAADFGSSQARRRVFMISTLNEFVELPKGDKKPKSIKKVLNKIVSEKDILNNLLKYNLTEFKKTKSNINKASLIGYSKFNSEGYVYDPEFTGPTLTASGANSRIKIKDGSNIRKMNSDETFLYIGFDSQDGKRVNEIEFLTENQKIFVCGNSISVEVLEAIIDKIGG

SEQ ID NO: 91 - DNA, 7433 bp, Artificial Sequence
  Description of Artificial Sequence: Synthetic polynucleotide
tcgcgcgtttcggtgatgacggtgaaaacctctgacacatgcagctcccggagacggtcacagcttgtctgtaagcggatgccgggagcagacaagcccgtcagggcgcgtcagcgggtgttggcgggtgtcggggctggcttaactatgcggcatcagagcagattgtactgagagtgcaccatatgcggtgtgaaataccgcacagatgcgtaaggagaaaataccgcatcaggcgccattcgccattcaggctgcgcaactgttgggaagggcgatcggtgcgggcctcttcgctattacgccagctggcgaaagggggatgtgctgcaaggcgattaagttgggtaacgccagggttttcccagtcacgacgttgtaaaacgacggccagtgaattgacgcgtattgggatggtacctaatacgactcactataaggaaataagagagaaaagaagagtaagaagaaatataagagccaccatggcccccaagaagaagcggaaggtgggcatccacggcgtgcccgccgccgccaagcggaactacatcctgggcctggccatcggcatcaccagcgtgggctacggcatcatcgactacgagacccgggacgtgatcgacgccggcgtgcggctgttcaaggaggccaacgtggagaacaacgagggccggcggagcaagcggggcgcccggcggctgaagcggcggcggcggcaccggatccagcgggtgaagaagctgctgttcgactacaacctgctgaccgaccacagcgagctgagcggcatcaacccctacgaggcccgggtgaagggcctgagccagaagctgagcgaggaggagttcagcgccgccctgctgcacctggccaagcggcggggcgtgcacaacgtgaacgaggtggaggaggacaccggcaacgagctgagcaccaaggagcagatcagccggaacagcaaggccctggaggagaagtacgtggccgagctgcagctggagcggctgaagaaggacggcgaggtgcggggcagcatcaaccggttcaagaccagcgactacgtgaaggaggccaagcagctgctgaaggtgcagaaggcctaccaccagctggaccagagcttcatcgacacctacatcgacctgctggagacccggcggacctactacgagggccccggcgagggcagccccttcggctggaaggacatcaaggagtggtacgagatgctgatgggccactgcacctacttccccgaggagctgcggagcgtgaagtacgcctacaacgccgacctgtacaacgccctgaacgacctgaacaacctggtgatcacccgggacgagaacgagaagctggagtactacgagaagttccagatcatcgagaacgtgttcaagcagaagaagaagcccaccctgaagcagatcgccaaggagatcctggtgaacgaggaggacatcaagggctaccgggtgaccagcaccggcaagcccgagttcaccaacctgaaggtgtaccacgacatcaaggacatcaccgcccggaaggagatcatcgagaacgccgagctgctggaccagatcgccaagatcctgaccatctaccagagcagcgaggacatccaggaggagctgaccaacctgaacagcgagctgacccaggaggagatcgagcagatcagcaacctgaagggctacaccggcacccacaacctgagcctgaaggccatcaacctgatcctggacgagctgtggcacaccaacgacaaccagatcgccatcttcaaccggctgaagctggtgcccaagaaggtggacctgagccagcagaaggagatccccaccaccctggtggacgacttcatcctgagccccgtggtgaagcggagcttcatccagagcatcaaggtgatcaacgccatcatcaagaagtacggcctgcccaacgacatcatcatcgagctggcccgggagaagaacagcaaggacgcccagaagatgatcaacgagatgcagaagcggaaccggcagaccaacgagcggatcgaggagatcatccggaccaccggcaaggagaacgccaagtacctgatcgagaagatcaagctgcacgacatgcaggagggcaagtgcctgtacagcctggaggccatccccctggaggacctgctgaacaaccccttcaactacgaggtggacgccatcatcccccggagcgtgagcttcgacaacagcttcaacaacaaggtgctggtgaagcaggaggagaacagcaagaagggcaaccggacccccttccagtacctgagcagcagcgacagcaagatcagctacgagaccttcaagaagcacatcctgaacctggccaagggcaagggccggatcagcaagaccaagaaggagtacctgctggaggagcgggacatcaaccggttcagcgtgcagaaggacttcatcaaccggaacctggtggacacccggtacgccacccggggcctgatgaacctgctgcggagctacttccgggtgaacaacctggacgtgaaggtgaaatccatcaacggcggcttcaccagcttcctgcggcggaagtggaagttcaagaaggagcggaacaagggctacaagcaccacgccgaggacgccctgatcatcgccaacgccgacttcatcttcaaggagtggaagaagctggacaaggccaagaaggtgatggagaaccagatgttcgaggagaagcaggccgagagcatgcccgagatcgagaccgagcaggagtacaaggagatcttcatcaccccccaccagatcaagcacatcaaggacttcaaggactacaagtacagccaccgggtggacaagaagcccaaccggaagctgatcaacgacaccctgtacagcacccggaaggacgacaagggcaacaccctgatcgtgaacaacctgaacggcctgtacgacaaggacaacgacaagctgaagaagctgatcaacaagagccccgagaagctgctgatgtaccaccacgacccccagacctaccagaagctgaagctgatcatggagcagtacggcgacgagaagaaccccctgtacaagtactacgaggagaccggcaactacctgaccaagtacagcaagaaggacaacggccccgtgatcaagaagatcaagtactacggcaacaagctgaacgcccacctggacatcaccgacgactaccccaacagccggaacaaggtggtgaagctgagcctgaagccctaccggttcgacgtgtacctggacaacggcgtgtacaagttcgtgaccgtgaagaacctggacgtgatcaagaaggagaactactacgaggtgaacagcaagtgctacgaggaggccaagaagctgaagaagatcagcaaccaggccgagttcatcgccagcttctacaagaacgacctgatcaagatcaacggcgagctgtaccgggtgatcggcgtgaacaacgacctgctgaaccggatcgaggtgaacatgatcgacatcacctaccgggagtacctggagaacatgaacgacaagcggcccccccacatcatcaagaccatcgccagcaagacccagagcatcaagaagtacagcaccgacatcctgggcaacctgtacgaggtgaaatccaagaagcacccccagatcatcaagaagggcaagcggcccgccgccaccaagaaggccggccaggccaagaagaagaaggcccgggacagcaaggtggagaacaagaccaagaagctgcgggtgttcgaggccttcgccggcatcggcgcccagcggaaggccctggagaaggtgcggaaggacgagtacgagatcgtgggcctggccgagtggtacgtgcccgccatcgtgatgtaccaggccatccacaacaacttccacaccaagctggagtacaagagcgtgagccgggaggagatgatcgactacctggagaacaagaccctgagctggaacagcaagaaccccgtgagcaacggctactggaagcggaagaaggacgacgagctgaagatcatctacaacgccatcaagctgagcgagaaggagggcaacatcttcgacatccgggacctgtacaagcggaccctgaagaacatcgacctgctgacctacagcttcccctgccaggacctgagccagcagggcatccagaagggcatgaagcggggcagcggcacccggagcggcctgctgtgggagatcgagcgggccctggacagcaccgagaagaacgacctgcccaagtacctgctgatggagaacgtgggcgccctgctgcacaagaagaacgaggaggagctgaaccagtggaagcagaagctggagagcctgggctaccagaacagcatcgaggtgctgaacgccgccgacttcggcagcagccaggcccggcggcgggtgttcatgatcagcaccctgaacgagttcgtggagctgcccaagggcgacaagaagcccaagagcatcaagaaggtgctgaacaagatcgtgagcgagaaggacatcctgaacaacctgctgaagtacaacctgaccgagttcaagaaaaccaagagcaacatcaacaaggccagcctgatcggctacagcaagttcaacagcgagggctacgtgtacgaccccgagttcaccggccccaccctgaccgccagcggcgccaacagccggatcaagatcaaggacggcagcaacatccggaagatgaacagcgacgagaccttcctgtacatcggcttcgacagccaggacggcaagcgggtgaacgagatcgagttcctgaccgagaaccagaagatcttcgtgtgcggcaacagcatcagcgtggaggtgctggaggccatcatcgacaagatcggcggccccagcagcggcggcaagcggcccgccgccaccaagaaggccggccaggccaagaagaagaagggcagctacccctacgacgtgcccgactacgcctgagcggccgcttaattaagctgccttctgcggggcttgccttctggccatgcccttcttctctcccttgcacctgtacctcttggtctttgaataaagcctgagtaggaagtctagaaaaaaaaaaaaaaaaaaaaaaaaaaaaaaaaaaaaaaaaaaaaaaaaaaaaaaaaaaaaaaaaaaaaaaaaaaaaaaaattgtcttcttcatcgcctgcagatcccaatggcgcgccgagcttggctcgagcatggtcatagctgtttcctgtgtgaaattgttatccgctcacaattccacacaacatacgagccggaagcataaagtgtaaagcctggggtgcctaatgagtgagctaactcacattaattgcgttgcgctcactgcccgctttccagtcgggaaacctgtcgtgccagctgcattaatgaatcggccaacgcgcggggagaggcggtttgcgtattgggcgctcttccgcttcctcgctcactgactcgctgcgctcggtcgttcggctgcggcgagcggtatcagctcactcaaaggcggtaatacggttatccacagaatcaggggataacgcaggaaagaacatgtgagcaaaaggccagcaaaaggccaggaaccgtaaaaaggccgcgttgctggcgtttttccataggctccgcccccctgacgagcatcacaaaaatcgacgctcaagtcagaggtggcgaaacccgacaggactataaagataccaggcgtttccccctggaagctccctcgtgcgctctcctgttccgaccctgccgcttaccggatacctgtccgcctttctcccttcgggaagcgtggcgctttctcatagctcacgctgtaggtatctcagttcggtgtaggtcgttcgctccaagctgggctgtgtgcacgaaccccccgttcagcccgaccgctgcgccttatccggtaactatcgtcttgagtccaacccggtaagacacgacttatcgccactggcagcagccactggtaacaggattagcagagcgaggtatgtaggcggtgctacagagttcttgaagtggtggcctaactacggctacactagaagaacagtatttggtatctgcgctctgctgaagccagttaccttcggaaaaagagttggtagctcttgatccggcaaacaaaccaccgctggtagcggtggtttttttgtttgcaagcagcagattacgcgcagaaaaaaaggatctcaagaagatcctttgatcttttctacggggtctgacgctcagtggaacgaaaactcacgttaagggattttggtcatgagattatcaaaaaggatcttcacctagatccttttaaattaaaaatgaagttttaaatcaatctaaagtatatatgagtaaacttggtctgacagttagaaaaactcatcgagcatcaaatgaaactgcaatttattcatatcaggattatcaataccatatttttgaaaaagccgtttctgtaatgaaggagaaaactcaccgaggcagttccataggatggcaagatcctggtatcggtctgcgattccgactcgtccaacatcaatacaacctattaatttcccctcgtcaaaaataaggttatcaagtgagaaatcaccatgagtgacgactgaatccggtgagaatggcaaaagtttatgcatttctttccagacttgttcaacaggccagccattacgctcgtcatcaaaatcactcgcatcaaccaaaccgttattcattcgtgattgcgcctgagcgagacgaaatacgcgatcgctgttaaaaggacaattacaaacaggaatcgaatgcaaccggcgcaggaacactgccagcgcatcaacaatattttcacctgaatcaggatattcttctaatacctggaatgctgttttcccagggatcgcagtggtgagtaaccatgcatcatcaggagtacggataaaatgcttgatggtcggaagaggcataaattccgtcagccagtttagtctgaccatctcatctgtaacatcattggcaacgctacctttgccatgtttcagaaacaactctggcgcatcgggcttcccatacaatcgatagattgtcgcacctgattgcccgacattatcgcgagcccatttatacccatataaatcagcatccatgttggaatttaatcgcggcctagagcaagacgtttcccgttgaatatggctcatactcttcctttttcaatattattgaagcatttatcagggttattgtctcatgagcggatacatatttgaatgtatttagaaaaataaacaaataggggttccgcgcacatttccccgaaaagtgccacctgacgtctaagaaaccattattatcatgacattaacctataaaaataggcgtatcacgaggccctttcgtc

SEQ ID NO: 92 - DNA, 4762 bp, Artificial Sequence
  Description of Artificial Sequence: Synthetic polynucleotide
aggaaataagagagaaaagaagagtaagaagaaatataagagccaccatggcccccaagaagaagcggaaggtgggcatccacggcgtgcccgccgccgccaagcggaactacatcctgggcctggccatcggcatcaccagcgtgggctacggcatcatcgactacgagacccgggacgtgatcgacgccggcgtgcggctgttcaaggaggccaacgtggagaacaacgagggccggcggagcaagcggggcgcccggcggctgaagcggcggcggcggcaccggatccagcgggtgaagaagctgctgttcgactacaacctgctgaccgaccacagcgagctgagcggcatcaacccctacgaggcccgggtgaagggcctgagccagaagctgagcgaggaggagttcagcgccgccctgctgcacctggccaagcggcggggcgtgcacaacgtgaacgaggtggaggaggacaccggcaacgagctgagcaccaaggagcagatcagccggaacagcaaggccctggaggagaagtacgtggccgagctgcagctggagcggctgaagaaggacggcgaggtgcggggcagcatcaaccggttcaagaccagcgactacgtgaaggaggccaagcagctgctgaaggtgcagaaggcctaccaccagctggaccagagcttcatcgacacctacatcgacctgctggagacccggcggacctactacgagggccccggcgagggcagccccttcggctggaaggacatcaaggagtggtacgagatgctgatgggccactgcacctacttccccgaggagctgcggagcgtgaagtacgcctacaacgccgacctgtacaacgccctgaacgacctgaacaacctggtgatcacccgggacgagaacgagaagctggagtactacgagaagttccagatcatcgagaacgtgttcaagcagaagaagaagcccaccctgaagcagatcgccaaggagatcctggtgaacgaggaggacatcaagggctaccgggtgaccagcaccggcaagcccgagttcaccaacctgaaggtgtaccacgacatcaaggacatcaccgcccggaaggagatcatcgagaacgccgagctgctggaccagatcgccaagatcctgaccatctaccagagcagcgaggacatccaggaggagctgaccaacctgaacagcgagctgacccaggaggagatcgagcagatcagcaacctgaagggctacaccggcacccacaacctgagcctgaaggccatcaacctgatcctggacgagctgtggcacaccaacgacaaccagatcgccatcttcaaccggctgaagctggtgcccaagaaggtggacctgagccagcagaaggagatccccaccaccctggtggacgacttcatcctgagccccgtggtgaagcggagcttcatccagagcatcaaggtgatcaacgccatcatcaagaagtacggcctgcccaacgacatcatcatcgagctggcccgggagaagaacagcaaggacgcccagaagatgatcaacgagatgcagaagcggaaccggcagaccaacgagcggatcgaggagatcatccggaccaccggcaaggagaacgccaagtacctgatcgagaagatcaagctgcacgacatgcaggagggcaagtgcctgtacagcctggaggccatccccctggaggacctgctgaacaaccccttcaactacgaggtggacgccatcatcccccggagcgtgagcttcgacaacagcttcaacaacaaggtgctggtgaagcaggaggagaacagcaagaagggcaaccggacccccttccagtacctgagcagcagcgacagcaagatcagctacgagaccttcaagaagcacatcctgaacctggccaagggcaagggccggatcagcaagaccaagaaggagtacctgctggaggagcgggacatcaaccggttcagcgtgcagaaggacttcatcaaccggaacctggtggacacccggtacgccacccggggcctgatgaacctgctgcggagctacttccgggtgaacaacctggacgtgaaggtgaaatccatcaacggcggcttcaccagcttcctgcggcggaagtggaagttcaagaaggagcggaacaagggctacaagcaccacgccgaggacgccctgatcatcgccaacgccgacttcatcttcaaggagtggaagaagctggacaaggccaagaaggtgatggagaaccagatgttcgaggagaagcaggccgagagcatgcccgagatcgagaccgagcaggagtacaaggagatcttcatcaccccccaccagatcaagcacatcaaggacttcaaggactacaagtacagccaccgggtggacaagaagcccaaccggaagctgatcaacgacaccctgtacagcacccggaaggacgacaagggcaacaccctgatcgtgaacaacctgaacggcctgtacgacaaggacaacgacaagctgaagaagctgatcaacaagagccccgagaagctgctgatgtaccaccacgacccccagacctaccagaagctgaagctgatcatggagcagtacggcgacgagaagaaccccctgtacaagtactacgaggagaccggcaactacctgaccaagtacagcaagaaggacaacggccccgtgatcaagaagatcaagtactacggcaacaagctgaacgcccacctggacatcaccgacgactaccccaacagccggaacaaggtggtgaagctgagcctgaagccctaccggttcgacgtgtacctggacaacggcgtgtacaagttcgtgaccgtgaagaacctggacgtgatcaagaaggagaactactacgaggtgaacagcaagtgctacgaggaggccaagaagctgaagaagatcagcaaccaggccgagttcatcgccagcttctacaagaacgacctgatcaagatcaacggcgagctgtaccgggtgatcggcgtgaacaacgacctgctgaaccggatcgaggtgaacatgatcgacatcacctaccgggagtacctggagaacatgaacgacaagcggcccccccacatcatcaagaccatcgccagcaagacccagagcatcaagaagtacagcaccgacatcctgggcaacctgtacgaggtgaaatccaagaagcacccccagatcatcaagaagggcaagcggcccgccgccaccaagaaggccggccaggccaagaagaagaaggcccgggacagcaaggtggagaacaagaccaagaagctgcgggtgttcgaggccttcgccggcatcggcgcccagcggaaggccctggagaaggtgcggaaggacgagtacgagatcgtgggcctggccgagtggtacgtgcccgccatcgtgatgtaccaggccatccacaacaacttccacaccaagctggagtacaagagcgtgagccgggaggagatgatcgactacctggagaacaagaccctgagctggaacagcaagaaccccgtgagcaacggctactggaagcggaagaaggacgacgagctgaagatcatctacaacgccatcaagctgagcgagaaggagggcaacatcttcgacatccgggacctgtacaagcggaccctgaagaacatcgacctgctgacctacagcttcccctgccaggacctgagccagcagggcatccagaagggcatgaagcggggcagcggcacccggagcggcctgctgtgggagatcgagcgggccctggacagcaccgagaagaacgacctgcccaagtacctgctgatggagaacgtgggcgccctgctgcacaagaagaacgaggaggagctgaaccagtggaagcagaagctggagagcctgggctaccagaacagcatcgaggtgctgaacgccgccgacttcggcagcagccaggcccggcggcgggtgttcatgatcagcaccctgaacgagttcgtggagctgcccaagggcgacaagaagcccaagagcatcaagaaggtgctgaacaagatcgtgagcgagaaggacatcctgaacaacctgctgaagtacaacctgaccgagttcaagaaaaccaagagcaacatcaacaaggccagcctgatcggctacagcaagttcaacagcgagggctacgtgtacgaccccgagttcaccggccccaccctgaccgccagcggcgccaacagccggatcaagatcaaggacggcagcaacatccggaagatgaacagcgacgagaccttcctgtacatcggcttcgacagccaggacggcaagcgggtgaacgagatcgagttcctgaccgagaaccagaagatcttcgtgtgcggcaacagcatcagcgtggaggtgctggaggccatcatcgacaagatcggcggccccagcagcggcggcaagcggcccgccgccaccaagaaggccggccaggccaagaagaagaagggcagctacccctacgacgtgcccgactacgcctgagcggccgcttaattaagctgccttctgcggggcttgccttctggccatgcccttcttctctcccttgcacctgtacctcttggtctttgaataaagcctgagtaggaagtctagaaaaaaaaaaaaaaaaaaaaaaaaaaaaaaaaaaaaaaaaaaaaaaaaaaaaaaaaaaaaaaaaaaaaaaaaaaaaaaaa

SEQ ID NO: 93 - protein, 1506 aa, Artificial Sequence
  Description of Artificial Sequence: Synthetic polypeptide
MAPKKKRKVGIHGVPAAAKRNYILGLAIGITSVGYGIIDYETRDVIDAGVRLFKEANVENNEGRRSKRGARRLKRRRRHRIQRVKKLLFDYNLLTDHSELSGINPYEARVKGLSQKLSEEEFSAALLHLAKRRGVHNVNEVEEDTGNELSTKEQISRNSKALEEKYVAELQLERLKKDGEVRGSINRFKTSDYVKEAKQLLKVQKAYHQLDQSFIDTYIDLLETRRTYYEGPGEGSPFGWKDIKEWYEMLMGHCTYFPEELRSVKYAYNADLYNALNDLNNLVITRDENEKLEYYEKFQIIENVFKQKKKPTLKQIAKEILVNEEDIKGYRVTSTGKPEFTNLKVYHDIKDITARKEIIENAELLDQIAKILTIYQSSEDIQEELTNLNSELTQEEIEQISNLKGYTGTHNLSLKAINLILDELWHTNDNQIAIFNRLKLVPKKVDLSQQKEIPTTLVDDFILSPVVKRSFIQSIKVINAIIKKYGLPNDIIIELAREKNSKDAQKMINEMQKRNRQTNERIEEIIRTTGKENAKYLIEKIKLHDMQEGKCLYSLEAIPLEDLLNNPFNYEVDAIIPRSVSFDNSFNNKVLVKQEENSKKGNRTPFQYLSSSDSKISYETFKKHILNLAKGKGRISKTKKEYLLEERDINRFSVQKDFINRNLVDTRYATRGLMNLLRSYFRVNNLDVKVKSINGGFTSFLRRKWKFKKERNKGYKHHAEDALIIANADFIFKEWKKLDKAKKVMENQMFEEKQAESMPEIETEQEYKEIFITPHQIKHIKDFKDYKYSHRVDKKPNRKLINDTLYSTRKDDKGNTLIVNNLNGLYDKDNDKLKKLINKSPEKLLMYHHDPQTYQKLKLIMEQYGDEKNPLYKYYEETGNYLTKYSKKDNGPVIKKIKYYGNKLNAHLDITDDYPNSRNKVVKLSLKPYRFDVYLDNGVYKFVTVKNLDVIKKENYYEVNSKCYEEAKKLKKISNQAEFIASFYKNDLIKINGELYRVIGVNNDLLNRIEVNMIDITYREYLENMNDKRPPHIIKTIASKTQSIKKYSTDILGNLYEVKSKKHPQIIKKGKRPAATKKAGQAKKKKARDSKVENKTKKLRVFEAFAGIGAQRKALEKVRKDEYEIVGLAEWYVPAIVMYQAIHNNFHTKLEYKSVSREEMIDYLENKTLSWNSKNPVSNGYWKRKKDDELKIIYNAIKLSEKEGNIFDIRDLYKRTLKNIDLLTYSFPCQDLSQQGIQKGMKRGSGTRSGLLWEIERALDSTEKNDLPKYLLMENVGALLHKKNEEELNQWKQKLESLGYQNSIEVLNAADFGSSQARRRVFMISTLNEFVELPKGDKKPKSIKKVLNKIVSEKDILNNLLKYNLTEFKKTKSNINKASLIGYSKFNSEGYVYDPEFTGPTLTASGANSRIKIKDGSNIRKMNSDETFLYIGFDSQDGKRVNEIEFLTENQKIFVCGNSISVEVLEAIIDKIGGPSSGGKRPAATKKAGQAKKKKGSYPYDVPDYA

SEQ ID NO: 94 - DNA, 7499 bp, Artificial Sequence
  Description of Artificial Sequence: Synthetic polynucleotide
tcgcgcgtttcggtgatgacggtgaaaacctctgacacatgcagctcccggagacggtcacagcttgtctgtaagcggatgccgggagcagacaagcccgtcagggcgcgtcagcgggtgttggcgggtgtcggggctggcttaactatgcggcatcagagcagattgtactgagagtgcaccatatgcggtgtgaaataccgcacagatgcgtaaggagaaaataccgcatcaggcgccattcgccattcaggctgcgcaactgttgggaagggcgatcggtgcgggcctcttcgctattacgccagctggcgaaagggggatgtgctgcaaggcgattaagttgggtaacgccagggttttcccagtcacgacgttgtaaaacgacggccagtgaattgacgcgtattgggatggtacctaatacgactcactataaggaaataagagagaaaagaagagtaagaagaaatataagagccaccatggcccccaagaagaagcggaaggtgggcatccacggcgtgcccgccgccgacaagaagtacagcatcggcctggccatcggcaccaacagcgtgggctgggccgtgatcaccgacgagtacaaggtgcccagcaagaagttcaaggtgctgggcaacaccgaccggcacagcatcaagaagaacctgatcggcgccctgctgttcgacagcggcgagaccgccgaggccacccggctgaagcggaccgcccggcggcggtacacccggcggaagaaccggatctgctacctgcaggagatcttcagcaacgagatggccaaggtggacgacagcttcttccaccggctggaggagagcttcctggtggaggaggacaagaagcacgagcggcaccccatcttcggcaacatcgtggacgaggtggcctaccacgagaagtaccccaccatctaccacctgcggaagaagctggtggacagcaccgacaaggccgacctgcggctgatctacctggccctggcccacatgatcaagttccggggccacttcctgatcgagggcgacctgaaccccgacaacagcgacgtggacaagctgttcatccagctggtgcagacctacaaccagctgttcgaggagaaccccatcaacgccagcggcgtggacgccaaggccatcctgagcgcccggctgagcaagagccggcggctggagaacctgatcgcccagctgcccggcgagaagaagaacggcctgttcggcaacctgatcgccctgagcctgggcctgacccccaacttcaagagcaacttcgacctggccgaggacgccaagctgcagctgagcaaggacacctacgacgacgacctggacaacctgctggcccagatcggcgaccagtacgccgacctgttcctggccgccaagaacctgagcgacgccatcctgctgagcgacatcctgcgggtgaacaccgagatcaccaaggcccccctgagcgccagcatgatcaagcggtacgacgagcaccaccaggacctgaccctgctgaaggccctggtgcggcagcagctgcccgagaagtacaaggagatcttcttcgaccagagcaagaacggctacgccggctacatcgacggcggcgccagccaggaggagttctacaagttcatcaagcccatcctggagaagatggacggcaccgaggagctgctggtgaagctgaaccgggaggacctgctgcggaagcagcggaccttcgacaacggcagcatcccccaccagatccacctgggcgagctgcacgccatcctgcggcggcaggaggacttctaccccttcctgaaggacaaccgggagaagatcgagaagatcctgaccttccggatcccctactacgtgggccccctggcccggggcaacagccggttcgcctggatgacccggaaatccgaggagaccatcaccccctggaacttcgaggaggtggtggacaagggcgccagcgcccagagcttcatcgagcggatgaccaacttcgacaagaacctgcccaacgagaaggtgctgcccaagcacagcctgctgtacgagtacttcaccgtgtacaacgagctgaccaaggtgaagtacgtgaccgagggcatgcggaagcccgccttcctgagcggcgagcagaagaaggccatcgtggacctgctgttcaagaccaaccggaaggtgaccgtgaagcagctgaaggaggactacttcaagaagatcgagtgcttcgacagcgtggagatcagcggcgtggaggaccggttcaacgccagcctgggcacctaccacgacctgctgaagatcatcaaggacaaggacttcctggacaacgaggagaacgaggacatcctggaggacatcgtgctgaccctgaccctgttcgaggaccgggagatgatcgaggagcggctgaaaacctacgcccacctgttcgacgacaaggtgatgaagcagctgaagcggcggcggtacaccggctggggccggctgagccggaagctgatcaacggcatccgggacaagcagagcggcaagaccatcctggacttcctgaaatccgacggcttcgccaaccggaacttcatgcagctgatccacgacgacagcctgaccttcaaggaggacatccagaaggcccaggtgagcggccagggcgacagcctgcacgagcacatcgccaacctggccggcagccccgccatcaagaagggcatcctgcagaccgtgaaggtggtggacgagctggtgaaggtgatgggccggcacaagcccgagaacatcgtgatcgagatggcccgggagaaccagaccacccagaagggccagaagaacagccgggagcggatgaagcggatcgaggagggcatcaaggagctgggcagccagatcctgaaggagcaccccgtggagaacacccagctgcagaacgagaagctgtacctgtactacctgcagaacggccgggacatgtacgtggaccaggagctggacatcaaccggctgagcgactacgacgtggccgccatcgtgccccagagcttcctgaaggacgacagcatcgacaacaaggtgctgacccggagcgacaaggcccggggcaagagcgacaacgtgcccagcgaggaggtggtgaagaagatgaagaactactggcggcagctgctgaacgccaagctgatcacccagcggaagttcgacaacctgaccaaggccgagcggggcggcctgagcgagctggacaaggccggcttcatcaagcggcagctggtggagacccggcagatcaccaagcacgtggcccagatcctggacagccggatgaacaccaagtacgacgagaacgacaagctgatccgggaggtgaaggtgatcaccctgaaatccaagctggtgagcgacttccggaaggacttccagttctacaaggtgcgggagatcaacaactaccaccacgcccacgacgcctacctgaacgccgtggtgggcaccgccctgatcaagaagtaccccaagctggagagcgagttcgtgtacggcgactacaaggtgtacgacgtgcggaagatgatcgccaagagcgagcaggagatcggcaaggccaccgccaagtacttcttctacagcaacatcatgaacttcttcaagaccgagatcaccctggccaacggcgagatccggaagcggcccctgatcgagaccaacggcgagaccggcgagatcgtgtgggacaagggccgggacttcgccaccgtgcggaaggtgctgagcatgccccaggtgaacatcgtgaagaaaaccgaggtgcagaccggcggcttcagcaaggagagcatcctgcccaagcggaacagcgacaagctgatcgcccggaagaaggactgggaccccaagaagtacggcggcttcgacagccccaccgtggcctacagcgtgctggtggtggccaaggtggagaagggcaagagcaagaagctgaaatccgtgaaggagctgctgggcatcaccatcatggagcggagcagcttcgagaagaaccccatcgacttcctggaggccaagggctacaaggaggtgaagaaggacctgatcatcaagctgcccaagtacagcctgttcgagctggagaacggccggaagcggatgctggccagcgccggcgagctgcagaagggcaacgagctggccctgcccagcaagtacgtgaacttcctgtacctggccagccactacgagaagctgaagggcagccccgaggacaacgagcagaagcagctgttcgtggagcagcacaagcactacctggacgagatcatcgagcagatcagcgagttcagcaagcgggtgatcctggccgacgccaacctggacaaggtgctgagcgcctacaacaagcaccgggacaagcccatccgggagcaggccgagaacatcatccacctgttcaccctgaccaacctgggcgcccccgccgccttcaagtacttcgacaccaccatcgaccggaagcggtacaccagcaccaaggaggtgctggacgccaccctgatccaccagagcatcaccggcctgtacgagacccggatcgacctgagccagctgggcggcgacaagcggcccgccgccaccaagaaggccggccaggccaagaagaagaaggccagcgacgccaagagcctgaccgcctggagccggaccctggtgaccttcaaggacgtgttcgtggacttcacccgggaggagtggaagctgctggacaccgcccagcagatcctgtaccggaacgtgatgctggagaactacaagaacctggtgagcctgggctaccagctgaccaagcccgacgtgatcctgcggctggagaagggcgaggagccctggctggtggagcgggagatccaccaggagacccaccccgacagcgagaccgccttcgagatcaagagcagcgtgagcggcggcaagcggcccgccgccaccaagaaggccggccaggccaagaagaagaagggcagctacccctacgacgtgcccgactacgcctgagcggccgcttaattaagctgccttctgcggggcttgccttctggccatgcccttcttctctcccttgcacctgtacctcttggtctttgaataaagcctgagtaggaagtctagaaaaaaaaaaaaaaaaaaaaaaaaaaaaaaaaaaaaaaaaaaaaaaaaaaaaaaaaaaaaaaaaaaaaaaaaaaaaaaaattgtcttcttcatcgcctgcagatcccaatggcgcgccgagcttggctcgagcatggtcatagctgtttcctgtgtgaaattgttatccgctcacaattccacacaacatacgagccggaagcataaagtgtaaagcctggggtgcctaatgagtgagctaactcacattaattgcgttgcgctcactgcccgctttccagtcgggaaacctgtcgtgccagctgcattaatgaatcggccaacgcgcggggagaggcggtttgcgtattgggcgctcttccgcttcctcgctcactgactcgctgcgctcggtcgttcggctgcggcgagcggtatcagctcactcaaaggcggtaatacggttatccacagaatcaggggataacgcaggaaagaacatgtgagcaaaaggccagcaaaaggccaggaaccgtaaaaaggccgcgttgctggcgtttttccataggctccgcccccctgacgagcatcacaaaaatcgacgctcaagtcagaggtggcgaaacccgacaggactataaagataccaggcgtttccccctggaagctccctcgtgcgctctcctgttccgaccctgccgcttaccggatacctgtccgcctttctcccttcgggaagcgtggcgctttctcatagctcacgctgtaggtatctcagttcggtgtaggtcgttcgctccaagctgggctgtgtgcacgaaccccccgttcagcccgaccgctgcgccttatccggtaactatcgtcttgagtccaacccggtaagacacgacttatcgccactggcagcagccactggtaacaggattagcagagcgaggtatgtaggcggtgctacagagttcttgaagtggtggcctaactacggctacactagaagaacagtatttggtatctgcgctctgctgaagccagttaccttcggaaaaagagttggtagctcttgatccggcaaacaaaccaccgctggtagcggtggtttttttgtttgcaagcagcagattacgcgcagaaaaaaaggatctcaagaagatcctttgatcttttctacggggtctgacgctcagtggaacgaaaactcacgttaagggattttggtcatgagattatcaaaaaggatcttcacctagatccttttaaattaaaaatgaagttttaaatcaatctaaagtatatatgagtaaacttggtctgacagttagaaaaactcatcgagcatcaaatgaaactgcaatttattcatatcaggattatcaataccatatttttgaaaaagccgtttctgtaatgaaggagaaaactcaccgaggcagttccataggatggcaagatcctggtatcggtctgcgattccgactcgtccaacatcaatacaacctattaatttcccctcgtcaaaaataaggttatcaagtgagaaatcaccatgagtgacgactgaatccggtgagaatggcaaaagtttatgcatttctttccagacttgttcaacaggccagccattacgctcgtcatcaaaatcactcgcatcaaccaaaccgttattcattcgtgattgcgcctgagcgagacgaaatacgcgatcgctgttaaaaggacaattacaaacaggaatcgaatgcaaccggcgcaggaacactgccagcgcatcaacaatattttcacctgaatcaggatattcttctaatacctggaatgctgttttcccagggatcgcagtggtgagtaaccatgcatcatcaggagtacggataaaatgcttgatggtcggaagaggcataaattccgtcagccagtttagtctgaccatctcatctgtaacatcattggcaacgctacctttgccatgtttcagaaacaactctggcgcatcgggcttcccatacaatcgatagattgtcgcacctgattgcccgacattatcgcgagcccatttatacccatataaatcagcatccatgttggaatttaatcgcggcctagagcaagacgtttcccgttgaatatggctcatactcttcctttttcaatattattgaagcatttatcagggttattgtctcatgagcggatacatatttgaatgtatttagaaaaataaacaaataggggttccgcgcacatttccccgaaaagtgccacctgacgtctaagaaaccattattatcatgacattaacctataaaaataggcgtatcacgaggccctttcgtc

SEQ ID NO: 95 - DNA, 4828 bp, Artificial Sequence
  Description of Artificial Sequence: Synthetic polynucleotide
aggaaataagagagaaaagaagagtaagaagaaatataagagccaccatggcccccaagaagaagcggaaggtgggcatccacggcgtgcccgccgccgacaagaagtacagcatcggcctggccatcggcaccaacagcgtgggctgggccgtgatcaccgacgagtacaaggtgcccagcaagaagttcaaggtgctgggcaacaccgaccggcacagcatcaagaagaacctgatcggcgccctgctgttcgacagcggcgagaccgccgaggccacccggctgaagcggaccgcccggcggcggtacacccggcggaagaaccggatctgctacctgcaggagatcttcagcaacgagatggccaaggtggacgacagcttcttccaccggctggaggagagcttcctggtggaggaggacaagaagcacgagcggcaccccatcttcggcaacatcgtggacgaggtggcctaccacgagaagtaccccaccatctaccacctgcggaagaagctggtggacagcaccgacaaggccgacctgcggctgatctacctggccctggcccacatgatcaagttccggggccacttcctgatcgagggcgacctgaaccccgacaacagcgacgtggacaagctgttcatccagctggtgcagacctacaaccagctgttcgaggagaaccccatcaacgccagcggcgtggacgccaaggccatcctgagcgcccggctgagcaagagccggcggctggagaacctgatcgcccagctgcccggcgagaagaagaacggcctgttcggcaacctgatcgccctgagcctgggcctgacccccaacttcaagagcaacttcgacctggccgaggacgccaagctgcagctgagcaaggacacctacgacgacgacctggacaacctgctggcccagatcggcgaccagtacgccgacctgttcctggccgccaagaacctgagcgacgccatcctgctgagcgacatcctgcgggtgaacaccgagatcaccaaggcccccctgagcgccagcatgatcaagcggtacgacgagcaccaccaggacctgaccctgctgaaggccctggtgcggcagcagctgcccgagaagtacaaggagatcttcttcgaccagagcaagaacggctacgccggctacatcgacggcggcgccagccaggaggagttctacaagttcatcaagcccatcctggagaagatggacggcaccgaggagctgctggtgaagctgaaccgggaggacctgctgcggaagcagcggaccttcgacaacggcagcatcccccaccagatccacctgggcgagctgcacgccatcctgcggcggcaggaggacttctaccccttcctgaaggacaaccgggagaagatcgagaagatcctgaccttccggatcccctactacgtgggccccctggcccggggcaacagccggttcgcctggatgacccggaaatccgaggagaccatcaccccctggaacttcgaggaggtggtggacaagggcgccagcgcccagagcttcatcgagcggatgaccaacttcgacaagaacctgcccaacgagaaggtgctgcccaagcacagcctgctgtacgagtacttcaccgtgtacaacgagctgaccaaggtgaagtacgtgaccgagggcatgcggaagcccgccttcctgagcggcgagcagaagaaggccatcgtggacctgctgttcaagaccaaccggaaggtgaccgtgaagcagctgaaggaggactacttcaagaagatcgagtgcttcgacagcgtggagatcagcggcgtggaggaccggttcaacgccagcctgggcacctaccacgacctgctgaagatcatcaaggacaaggacttcctggacaacgaggagaacgaggacatcctggaggacatcgtgctgaccctgaccctgttcgaggaccgggagatgatcgaggagcggctgaaaacctacgcccacctgttcgacgacaaggtgatgaagcagctgaagcggcggcggtacaccggctggggccggctgagccggaagctgatcaacggcatccgggacaagcagagcggcaagaccatcctggacttcctgaaatccgacggcttcgccaaccggaacttcatgcagctgatccacgacgacagcctgaccttcaaggaggacatccagaaggcccaggtgagcggccagggcgacagcctgcacgagcacatcgccaacctggccggcagccccgccatcaagaagggcatcctgcagaccgtgaaggtggtggacgagctggtgaaggtgatgggccggcacaagcccgagaacatcgtgatcgagatggcccgggagaaccagaccacccagaagggccagaagaacagccgggagcggatgaagcggatcgaggagggcatcaaggagctgggcagccagatcctgaaggagcaccccgtggagaacacccagctgcagaacgagaagctgtacctgtactacctgcagaacggccgggacatgtacgtggaccaggagctggacatcaaccggctgagcgactacgacgtggccgccatcgtgccccagagcttcctgaaggacgacagcatcgacaacaaggtgctgacccggagcgacaaggcccggggcaagagcgacaacgtgcccagcgaggaggtggtgaagaagatgaagaactactggcggcagctgctgaacgccaagctgatcacccagcggaagttcgacaacctgaccaaggccgagcggggcggcctgagcgagctggacaaggccggcttcatcaagcggcagctggtggagacccggcagatcaccaagcacgtggcccagatcctggacagccggatgaacaccaagtacgacgagaacgacaagctgatccgggaggtgaaggtgatcaccctgaaatccaagctggtgagcgacttccggaaggacttccagttctacaaggtgcgggagatcaacaactaccaccacgcccacgacgcctacctgaacgccgtggtgggcaccgccctgatcaagaagtaccccaagctggagagcgagttcgtgtacggcgactacaaggtgtacgacgtgcggaagatgatcgccaagagcgagcaggagatcggcaaggccaccgccaagtacttcttctacagcaacatcatgaacttcttcaagaccgagatcaccctggccaacggcgagatccggaagcggcccctgatcgagaccaacggcgagaccggcgagatcgtgtgggacaagggccgggacttcgccaccgtgcggaaggtgctgagcatgccccaggtgaacatcgtgaagaaaaccgaggtgcagaccggcggcttcagcaaggagagcatcctgcccaagcggaacagcgacaagctgatcgcccggaagaaggactgggaccccaagaagtacggcggcttcgacagccccaccgtggcctacagcgtgctggtggtggccaaggtggagaagggcaagagcaagaagctgaaatccgtgaaggagctgctgggcatcaccatcatggagcggagcagcttcgagaagaaccccatcgacttcctggaggccaagggctacaaggaggtgaagaaggacctgatcatcaagctgcccaagtacagcctgttcgagctggagaacggccggaagcggatgctggccagcgccggcgagctgcagaagggcaacgagctggccctgcccagcaagtacgtgaacttcctgtacctggccagccactacgagaagctgaagggcagccccgaggacaacgagcagaagcagctgttcgtggagcagcacaagcactacctggacgagatcatcgagcagatcagcgagttcagcaagcgggtgatcctggccgacgccaacctggacaaggtgctgagcgcctacaacaagcaccgggacaagcccatccgggagcaggccgagaacatcatccacctgttcaccctgaccaacctgggcgcccccgccgccttcaagtacttcgacaccaccatcgaccggaagcggtacaccagcaccaaggaggtgctggacgccaccctgatccaccagagcatcaccggcctgtacgagacccggatcgacctgagccagctgggcggcgacaagcggcccgccgccaccaagaaggccggccaggccaagaagaagaaggccagcgacgccaagagcctgaccgcctggagccggaccctggtgaccttcaaggacgtgttcgtggacttcacccgggaggagtggaagctgctggacaccgcccagcagatcctgtaccggaacgtgatgctggagaactacaagaacctggtgagcctgggctaccagctgaccaagcccgacgtgatcctgcggctggagaagggcgaggagccctggctggtggagcgggagatccaccaggagacccaccccgacagcgagaccgccttcgagatcaagagcagcgtgagcggcggcaagcggcccgccgccaccaagaaggccggccaggccaagaagaagaagggcagctacccctacgacgtgcccgactacgcctgagcggccgcttaattaagctgccttctgcggggcttgccttctggccatgcccttcttctctcccttgcacctgtacctcttggtctttgaataaagcctgagtaggaagtctagaaaaaaaaaaaaaaaaaaaaaaaaaaaaaaaaaaaaaaaaaaaaaaaaaaaaaaaaaaaaaaaaaaaaaaaaaaaaaaaa

SEQ ID NO: 96 - protein, 1528 aa, Artificial Sequence
  Description of Artificial Sequence: Synthetic polypeptide
MAPKKKRKVGIHGVPAADKKYSIGLAIGTNSVGWAVITDEYKVPSKKFKVLGNTDRHSIKKNLIGALLFDSGETAEATRLKRTARRRYTRRKNRICYLQEIFSNEMAKVDDSFFHRLEESFLVEEDKKHERHPIFGNIVDEVAYHEKYPTIYHLRKKLVDSTDKADLRLIYLALAHMIKFRGHFLIEGDLNPDNSDVDKLFIQLVQTYNQLFEENPINASGVDAKAILSARLSKSRRLENLIAQLPGEKKNGLFGNLIALSLGLTPNFKSNFDLAEDAKLQLSKDTYDDDLDNLLAQIGDQYADLFLAAKNLSDAILLSDILRVNTEITKAPLSASMIKRYDEHHQDLTLLKALVRQQLPEKYKEIFFDQSKNGYAGYIDGGASQEEFYKFIKPILEKMDGTEELLVKLNREDLLRKQRTFDNGSIPHQIHLGELHAILRRQEDFYPFLKDNREKIEKILTFRIPYYVGPLARGNSRFAWMTRKSEETITPWNFEEVVDKGASAQSFIERMTNFDKNLPNEKVLPKHSLLYEYFTVYNELTKVKYVTEGMRKPAFLSGEQKKAIVDLLFKTNRKVTVKQLKEDYFKKIECFDSVEISGVEDRFNASLGTYHDLLKIIKDKDFLDNEENEDILEDIVLTLTLFEDREMIEERLKTYAHLFDDKVMKQLKRRRYTGWGRLSRKLINGIRDKQSGKTILDFLKSDGFANRNFMQLIHDDSLTFKEDIQKAQVSGQGDSLHEHIANLAGSPAIKKGILQTVKVVDELVKVMGRHKPENIVIEMARENQTTQKGQKNSRERMKRIEEGIKELGSQILKEHPVENTQLQNEKLYLYYLQNGRDMYVDQELDINRLSDYDVAAIVPQSFLKDDSIDNKVLTRSDKARGKSDNVPSEEVVKKMKNYWRQLLNAKLITQRKFDNLTKAERGGLSELDKAGFIKRQLVETRQITKHVAQILDSRMNTKYDENDKLIREVKVITLKSKLVSDFRKDFQFYKVREINNYHHAHDAYLNAVVGTALIKKYPKLESEFVYGDYKVYDVRKMIAKSEQEIGKATAKYFFYSNIMNFFKTEITLANGEIRKRPLIETNGETGEIVWDKGRDFATVRKVLSMPQVNIVKKTEVQTGGFSKESILPKRNSDKLIARKKDWDPKKYGGFDSPTVAYSVLVVAKVEKGKSKKLKSVKELLGITIMERSSFEKNPIDFLEAKGYKEVKKDLIIKLPKYSLFELENGRKRMLASAGELQKGNELALPSKYVNFLYLASHYEKLKGSPEDNEQKQLFVEQHKHYLDEIIEQISEFSKRVILADANLDKVLSAYNKHRDKPIREQAENIIHLFTLTNLGAPAAFKYFDTTIDRKRYTSTKEVLDATLIHQSITGLYETRIDLSQLGGDKRPAATKKAGQAKKKKASDAKSLTAWSRTLVTFKDVFVDFTREEWKLLDTAQQILYRNVMLENYKNLVSLGYQLTKPDVILRLEKGEEPWLVEREIHQETHPDSETAFEIKSSVSGGKRPAATKKAGQAKKKKGSYPYDVPDYA

SEQ ID NO: 97 - DNA, 13 bp, Artificial Sequence
  Description of Artificial Sequence: Synthetic oligonucleotide
atgattggattta

SEQ ID NO: 98 - DNA, 13 bp, Artificial Sequence
  Description of Artificial Sequence: Synthetic oligonucleotide
tgattggatttag

SEQ ID NO: 99 - DNA, 13 bp, Artificial Sequence
  Description of Artificial Sequence: Synthetic oligonucleotide
atgattggattta

SEQ ID NO: 100 - DNA, 13 bp, Artificial Sequence
  Description of Artificial Sequence: Synthetic oligonucleotide
atgattcgattta
